(19) United States
(12) Patent Application Publication
(10) Pub. No.: US 2024/0124536 A1
(43) Pub. Date: Apr. 18, 2024

(54) BASE EDITING OF TRANSTHYRETIN GENE

(71) Applicant: Beam Therapeutics Inc., Cambridge, MA (US)

(72) Inventors: Alexandra C. CHADWICK, Boston, MA (US); Kallanthottathil G. RAJEEV, Boston, MA (US)

(73) Assignee: Beam Therapeutics Inc., Cambridge, MA (US)

(21) Appl. No.: 18/515,118

(22) Filed: Nov. 20, 2023

Related U.S. Application Data
(63) Continuation of application No. PCT/US2022/030359, filed on May 20, 2022.
(60) Provisional application No. 63/191,458, filed on May 21, 2021.
(60) Provisional application No. 63/322,182, filed on Mar. 21, 2022.

(51) Int. Cl. C07K 14/47; C12N 9/22

(52) U.S. Cl. CPC C07K 14/4702; C12N 9/22; C07K 2319/09; C12Y 305/04004; C12Y 305/04005

(57) ABSTRACT

Provided herein are compositions for gene modification related to base editor systems, and methods of using the same to treat or prevent conditions associated with the extracellular deposition in various tissues of amyloid fibrils formed by the aggregation of misfolded transthyretin (TTR) proteins. Such conditions include, but are not limited to, polyneuropathy due to hereditary transthyretin amyloidosis (hATTR-PN) and hereditary cardiomyopathy due to transthyretin amyloidosis (hATTR-CM), both associated with autosomal dominant mutations of the TTR gene, and an age-related cardiomyopathy associated with wild-type TTR proteins (ATTRwt), also known as senile cardiac amyloidosis.

### CROSS-REFERENCE TO RELATED APPLICATIONS

[0001] This application is a continuation under 35 U.S.C. § 111(a) of PCT International Patent Application No. PCT/US2022/030359, filed May 20, 2022, designating the United States and published in English, which claims priority to and the benefit of U.S. Provisional Patent Application No. 63/191,458, filed May 21, 2021, and U.S. Provisional Patent Application No. 63/322,182, filed Mar. 21, 2022, the entire contents of each of which are incorporated by reference herein.

### SEQUENCE LISTING

[0002] The present application contains a Sequence Listing which has been submitted electronically in XML format and is herein incorporated by reference in its entirety. The Sequence Listing XML file, created on Nov. 20, 2023, is named 180802-046703-SL.xml and is 5,143,926 bytes in size.

### BACKGROUND

[0003] Transthyretin (TTR) is a 55-kDa transport protein, for both thyroxine (T4) and retinol-binding protein, that circulates in soluble form in the serum and cerebrospinal fluid (CSF) of healthy humans. Under normal conditions, the TTR protein circulates as a homotetramer. Hereditary transthyretin amyloidosis (hATTR) is a disease due to mutations in the gene encoding TTR. Autosomal dominant mutations destabilize the TTR tetramer and enhance dissociation into monomers, resulting in misfolding, aggregation, and the subsequent extracellular deposition of TTR amyloid fibrils in different sites. This multisystem extracellular deposition of amyloid results in dysfunction of different organs and tissues. In particular, polyneuropathy (ATTR-PN) and cardiomyopathy (ATTR-CM) due to transthyretin amyloidosis are severe disorders associated with significant morbidity and mortality.

[0004] Since TTR is mainly produced by the liver, an early therapeutic approach for the treatment of hATTR amyloidosis was liver transplantation. Other therapies include the administration of oral drugs that act as kinetic stabilizers of TTR tetramers (such as tafamidis and diflunisal) and the suppression of TTR protein synthesis with gene-silencing drugs such as small interfering RNAs (siRNAs) (patisiran) and antisense oligonucleotides (inotersen).

[0005] The invention here recognizes that a gene editing approach for the treatment of transthyretin amyloidosis, including both polyneuropathy and cardiomyopathy, has the potential to deliver a once and done treatment with superior results to existing treatments.

### SUMMARY

[0006] Provided herein are compositions for gene modification or editing and methods of using the same to treat or prevent conditions associated with the extracellular deposition in various tissues of amyloid fibrils formed by the aggregation of misfolded transthyretin (TTR) proteins. Such conditions include, but are not limited to, polyneuropathy due to hereditary transthyretin amyloidosis (hATTR-PN) and hereditary cardiomyopathy due to transthyretin amyloidosis (hATTR-CM), both associated with autosomal dominant mutations of the TTR gene, and an age-related cardiomyopathy associated with wild-type TTR proteins (ATTRwt), also known as senile cardiac amyloidosis. Compositions and methods directed to editing the TTR gene using an editing system such as one comprising a base editor and guide RNAs are disclosed.

[0007] In a first aspect, an isolated polynucleotide or a nucleic acid encoding same is described. The polynucleotide comprises a 5′-spacer sequence comprising about 17 to about 23 nucleotides that is homologous to a targeted protospacer sequence within a gene encoding Transthyretin (TTR) adjacent to a NGG protospacer-adjacent motif (PAM) sequence within the genome. The isolated polynucleotide serves as a guide polynucleotide to direct a base editor system to effect a nucleobase alteration in the TTR gene.

[0008] The protospacer sequence may comprise a start codon or a splice site of the TTR gene. The nucleobase alteration effected in the TTR gene may comprise disruption of a start codon or disruption of an intron exon splice site. The isolated polynucleotide or a polynucleotide encoded by the nucleic acid encoding same may comprise a spacer sequence at least about 75%, at least about 80%, at least about 85%, at least about 90%, at least about 95%, or 100% identical to:

| | (GA457) |
|---|---|
| (SEQ ID NO: 1) | |
| | 5′-GCCAUCCUGCCAAGAAUGAG-3′; |
| | (GA519) |
| (SEQ ID NO: 2) | |
| | 5′-GCCAUCCUGCCAAGAACGAG-3′; |
| | (GA458) |
| (SEQ ID NO: 2) | |
| | 5′-GCCAUCCUGCCAAGAACGAG-3′; |
| | (GA459) |
| (SEQ ID NO: 3) | |
| | 5′-GCAACUUACCCAGAGGCAAA-3′; |
| | (GA460/GA520) |
| (SEQ ID NO: 4) | |
| | 5′-UAUAGGAAAACCAGUGAGUC-3′; |
| | or |
| | (GA461) |
| (SEQ ID NO: 5) | |
| | 5′-UACUCACCUCUGCAUGCUCA-3′. |

[0009] The isolated polynucleotide or a polynucleotide encoded by the nucleic acid encoding same may comprise a guide RNA.

[0010] In a second aspect, a composition is described. The composition comprises a polynucleotide or a nucleic acid according to the first aspect. The composition may comprise a nucleic acid encoding a base editor fusion protein. The base editor fusion protein may comprise a programmable DNA binding domain and a deaminase. The deaminase may comprise a cytosine deaminase or an adenine deaminase. The deaminase may comprise ABE8.8. The programmable DNA binding domain may comprise a Cas9 protein. The Cas9 protein, such as a Streptococcus pyogenes Cas9 protein, modified such that its cleavage activity is partially or completely eliminated. Such modified Cas9 proteins are referred to herein as “catalytically impaired” Cas9 proteins.

[0011] In a third aspect, a pharmaceutical composition is described. The pharmaceutical composition may comprise a composition according to the second aspect or may comprise a polynucleotide or a nucleic acid according to the first aspect.

[0012] In a fourth aspect, a lipid nanoparticle (LNP) is described. The LNP may comprise a pharmaceutical composition according to the third aspect, may comprise a composition according to the second aspect, or may comprise a polynucleotide or a nucleic acid according to the first aspect. The LNP may comprise cholesterol.

[0013] In a fifth aspect, a pharmaceutical composition comprising the LNP is described.

[0014] In a sixth aspect, a method of effecting one or more nucleobase alterations in a TTR gene in a cell is described. The method comprises contacting the cell with a polynucleotide or nucleic acid according to the first aspect, a composition according to the second aspect, a pharmaceutical composition according to the third or fifth aspects, or an LNP according to the fourth aspect.

[0015] In a seventh aspect, a method of effecting one or more nucleobase alterations in a Transthyretin (TTR) gene in a subject is described. The method comprises administering a polynucleotide or nucleic acid according to the first aspect, a composition according to the second aspect, a pharmaceutical composition according to the third or fifth aspect, or an LNP according to the fourth aspect to the subject. In some embodiments, one or more alleles of the TTR gene is silenced. The subject may be a human. The subject may be a subject in need thereof. The subject may suffer from, or may be at risk of, hereditary transthyretin amyloidosis (hATTR) due to one or more mutations in the TTR gene. The subject may suffer from, or may be at risk of, cardiomyopathy (hATTR-CM) and/or polyneuropathy (hATTR-PN). The subject may suffer from, or may be at risk of, senile cardiac amyloidosis characterized by wild-type alleles of the TTR gene (ATTRwt)

[0016] The polynucleotide or nucleic acid according to the first aspect, the composition according to the second aspect, the pharmaceutical composition according to the third or fifth aspect, or the LNP according to the fourth aspect may be administered to the subject in a therapeutically effective amount. The polynucleotide or nucleic acid according to the first aspect, the composition according to the second aspect, the pharmaceutical composition according to the third or fifth aspect, or the LNP according to the fourth aspect may be administered intravenously.

[0017] In an eighth aspect, a composition for editing a TTR gene is described. The composition comprises (a) a mRNA encoding a base editor protein having an editing window; and (b) a guide RNA comprising a tracr sequence that serves as a binding scaffold for the base editor protein and a spacer sequence that serves to guide the base editor protein to a protospacer on the TTR gene. The spacer sequence is complimentary, at least in part, to a splice site or a start codon of the sense or antisense strand of the TTR gene.

[0018] The base editor protein may comprise a cytidine deaminase or an adenosine deaminase. The cytidine deaminase may be a deoxycytidine deaminase. The adenosine deaminase may be a deoxyadenosine deaminase. The base editor protein may comprise a fusion protein comprising a nickase and a cytidine deaminase or an adenosine deaminase. The base editor protein may comprise a fusion protein comprising a D10A nickase Cas9 and a cytidine deaminase or an adenosine deaminase. The base editor protein may be comprised of a fusion protein comprising Adenine base editor ABE8.8.

[0019] The spacer sequence may be homologous to a protospacer sequence selected from Table 1 or Table 13. The spacer sequence may be selected from the following table:

gRNA spacer sequence (5′-3′)

gscscsAUCCUGCCAAGAAUGAG (SEQ ID NO: 6)
gscscsAUCCUGCCAAGAACGAG (SEQ ID NO: 7)
gscsasACUUACCCAGAGGCAAA (SEQ ID NO: 8)
usasusAGGAAAACCAGUGAGUC (SEQ ID NO: 9)
usascsUCACCUCUGCAUGCUCA (SEQ ID NO: 10)
gscscsAUCCUGCCAAGAACGAG (SEQ ID NO: 7)

[0020] wherein: A is adenosine; C is cytidine; G is guanosine; U is uridine; a is 2′-O-methyladenosine; c is 2′-O-methylcytidine; g is 2′-O-methylguanosine; u is 2′-O-methyluridine and s is phosphorothioate (PS) backbone linkage.

[0021] The spacer sequence may have greater than 80% sequence identity to a spacer sequence presented in the following table:

gRNA spacer sequence (5′-3′)

GCCAUCCUGCCAAGAAUGAG (SEQ ID NO: 1)
GCCAUCCUGCCAAGAACGAG (SEQ ID NO: 2)
GCAACUUACCCAGAGGCAAA (SEQ ID NO: 3)
UAUAGGAAAACCAGUGAGUC (SEQ ID NO: 4)
UACUCACCUCUGCAUGCUCA (SEQ ID NO: 5)
GCCAUCCUGCCAAGAACGAG (SEQ ID NO: 2)

[0022] wherein A is a modified or unmodified adenosine; C is a modified or unmodified cytidine; G is modified or unmodified guanosine; and U is a modified or unmodified uridine.

[0023] The guide RNA may be selected from the following table:

Guide RNA sequence (5′-3′)

gscscsAUCCUGCCAAGAAUGAGGUUUUAGAGCUAGAAAUAGCAAGUUAA
AAUAAGGCUAGUCCGUUAUCAACUUGAAAAAGUGGCACCGAGUCGGUGCU
sususu (SEQ ID NO: 11)
AUCCUGCCAAGAACGAGGUUUUAGAGCUAGAAAUAGCAAGUUAAAAUAAG
GCUAGUCCGUUAUCAACUUGAAAAAGUGGCACCGAGUCGGUGCUsususu
(SEQ ID NO: 12)
gscsasACUUACCCAGAGGCAAAGUUUUAGAGCUAGAAAUAGCAAGUUAA
AAUAAGGCUAGUCCGUUAUCAACUUGAAAAAGUGGCACCGAGUCGGUGCU
sususu (SEQ ID NO: 13)
usasusAGGAAAACCAGUGAGUCGUUUUAGAGCUAGAAAUAGCAAGUUAA
AAUAAGGCUAGUCCGUUAUCAACUUGAAAAAGUGGCACCGAGUCGGUGCU
sususu (SEQ ID NO: 14)
usascsUCACCUCUGCAUGCUCAGUUUUAGAGCUAGAAAUAGCAAGUUAA
AAUAAGGCUAGUCCGUUAUCAACUUGAAAAAGUGGCACCGAGUCGGUGCU
sususu (SEQ ID NO: 15)
gscscsAUCCUGCCAAGAACGAGgUUUUAGagcuaGaaauagcaaGUUaA
aAuAaggcuaGUccGUUAucAAcuuGaaaaagugGcaccgagucggugcu
ususus (SEQ ID NO: 16)
usasusAGGAAAACCAGUGAGUCgUUUUAGagcuaGaaauagcaaGUUaA
aAuAaggcuaGUccGUUAucAAcuuGaaaaagugGcaccgagucggugcu
ususus (SEQ ID NO: 17)

[0024] wherein A is adenosine; C is cytidine; G is guanosine; U is uridine; a is 2′-O-methyladenosine; c is 2′-O-methylcytidine; g is 2′-O-methylguanosine; u is 2′-O-methyluridine and s is phosphorothioate (PS) backbone linkage and wherein bold type represents the spacer sequence.

[0025] The spacer sequence may have greater than 8000 sequence identity to guide RNA sequences selected from the following table:

gRNA sequence (5′-3′)

5′GCCAUCCUGCCAAGAAUGAGGUUUUAGAGCUAGAAAUAGCAAGUUAAA
AUAAGGCUAGUCCGUUAUCAACUUGAAAAAGUGGCACCGAGUCGGUGCUU
UU 3′ (SEQ ID NO: 18)
5′GCCAUCCUGCCAAGAACGAGGUUUUAGAGCUAGAAAUAGCAAGUUAAA
AUAAGGCUAGUCCGUUAUCAACUUGAAAAAGUGGCACCGAGUCGGUGCUU
UU 3′ (SEQ ID NO: 19)
5′GCAACUUACCCAGAGGCAAAGUUUUAGAGCUAGAAAUAGCAAGUUAAA
AUAAGGCUAGUCCGUUAUCAACUUGAAAAAGUGGCACCGAGUCGGUGCUU
UU 3′ (SEQ ID NO: 20)
5′UAUAGGAAAACCAGUGAGUCGUUUUAGAGCUAGAAAUAGCAAGUUAAA
AUAAGGCUAGUCCGUUAUCAACUUGAAAAAGUGGCACCGAGUCGGUGCUU
UU 3′ (SEQ ID NO: 21)
5′UACUCACCUCUGCAUGCUCAGUUUUAGAGCUAGAAAUAGCAAGUUAAA
AUAAGGCUAGUCCGUUAUCAACUUGAAAAAGUGGCACCGAGUCGGUGCUU
UU 3′ (SEQ ID NO: 22)
5′GCCAUCCUGCCAAGAACGAGGUUUUAGAGCUAGAAAUAGCAAGUUAAA
AUAAGGCUAGUCCGUUAUCAACUUGAAAAAGUGGCACCGAGUCGGUGCUU
UU 3′(SEQ ID NO: 19)

[0026] The composition may be capable of producing editing activity set forth in Table 2, excluding GA459 therefrom, or Table 3. The composition may be capable of producing minimal or no off-target editing activity set forth in Tables 4, 6, 7, 8, 9, or 10. The composition may be encapsulated within a lipid nanoparticle. The composition may be administered in vivo to a subject.

### BRIEF DESCRIPTION OF THE FIGURES

[0027] FIGS. 1A, 1B, and 1C. A general schematic of a gene editor complexed with a gRNA targeting a gene of interest. Cas9 protein, guide RNA, Spacer sequence, protospacer sequence, and PAM (protospacer adjacent motif) are identified (FIG. 1A). FIG. 1A discloses SEQ ID NO: 5760. Additionally, schematics of general principles of base editing with cytosine base editors (CBE) (FIG. 1B) and adenine base editors (ABE) (FIG. 1C) are illustrated.

[0028] FIG. 2. Alteration of splice donor sites resulting from base editing. Top panel represents normal splicing of RNA transcribed from a gene. Bottom panel represents splicing that may result from transcription of a gene that has a disrupted splice site due to editing.

[0029] FIG. 3. Map of the human TTR gene (hTTR gene), shows the location of various restriction enzyme recognition sites, Exons 1-4, and the single guide RNAs GA457, GA459, GA460, and GA461 specified in Table 1.

[0030] FIG. 4. Nucleotide sequence of the human TTR gene (UniProtKB—P02766 (TTHY_HUMAN)) from the reference human genome (GRCh38) is shown and depicts the region on the gene where guides GA457, GA459, GA460, and GA461 are located. FIG. 4 discloses SEQ ID NO: 5761.

[0031] FIGS. 5A-5C. A schematic showing TTR guides and editing locations for GA457 (FIG. 5A), GA460 (FIG. 5B), and GA461 (FIG. 5C). Human genomic DNA (gDNA) sequences are labeled in black. Guide sequences are highlighted in grey above. Genomic exon sequences are in uppercase letters and intron sequences are in lowercase letters. The main position targeted by ABE editing is labeled with a black arrow. FIG. 5 discloses SEQ ID NOS 1, 5762, 4, 5763, 5 and 5764, respectively, in order of appearance.

[0032] FIG. 6. is a graph representing the percent splice editing in human hepatocytes using ABE editing with single guide RNAs GA457, GA459, GA460, and GA461 guide RNAs. The three TTR guide RNAs GA457, GA460, and GA461 show high activity in human hepatocytes. Each of the guides employ the identical tracr sequence and differ only by their RNA spacer sequence which corresponds to specified DNA protospacer sequences on the targeted TTR gene.

[0033] FIG. 7 is a flowchart of the ONE-seq protocol for determining candidate off-target sites.

[0034] FIG. 8 is a schematic diagram comparison of GA519 and GA457 hybridized to NHP and Human TTR exon 1. FIG. 8 discloses SEQ ID NOS 1, 5765, 2 and 5766, respectively, in order of appearance.

[0035] FIG. 9 is a schematic diagram showing a comparison of GA520 and GA460 hybridized to NHP and Human TTR exon 3. FIG. 9 discloses SEQ ID NOS 5767-5768 and 5767-5768, respectively, in order of appearance.

[0036] FIG. 10 is a bar graph showing hepatic editing of TTR gene by LNP1 and LNP2 in Non-Human Primates (NHPs) as described in the Examples.

[0037] FIG. 11 is a bar graph showing serum TTR protein changes as measured by ELISA in NHP treated with LNP1 and LNP2 as described in the Examples.

[0038] FIG. 12 is a bar graph showing serum TTR protein changes as measured by mass spectrometry in NHP treated with LNP1 and LNP2 as described in the Examples.

[0039] FIGS. 13A-13B are a bar graphs showing serum Alanine Aminotransferase (ALT), FIG. 13A, and serum Aspartate Aminotransferase (AST), FIG. 13B, concentrations in NHP treated with LNP1 and LNP2 as described in the Examples.

[0040] FIGS. 14A-14B are a bar graphs showing serum Lactate Dehydrogenase (LDH), FIG. 14A, and serum Glutamate Dehydrogenase (GDH), FIG. 14B, concentrations in NHP treated with LNP1 and LNP2 as described in the Examples.

[0041] FIGS. 15A-15B are a bar graphs showing serum Gamma-Glutamyl Transferase (GGT), FIG. 15A, and serum Alkaline Phosphatase (AP), FIG. 15B, concentrations in NHP treated with LNP1 and LNP2 as described in the Examples.

[0042] FIG. 16 is a bar graph showing serum total bilirubin concentrations in NHP treated with LNP1 and LNP2 as described in the Examples.

[0043] FIG. 17 is a bar graph showing serum creatine kinase concentrations in NHP treated with LNP1 and LNP2 as described in the examples.

[0044] FIG. 18 shows bar graphs of serum cytokine concentrations (MCP-1, upper left panel; IL-6, upper right panel; IP-10, lower left panel; and IL-IRA, lower right panel) over time in NHP treated with LNP1 and LNP2 as described in the Examples.

[0045] FIGS. 19A-19B are plots of plasma pharmacokinetic profiles of iLipid (FIG. 19A) and PEG lipids (FIG. 19B) in NHP treated with LNP1 and LNP2 as described in the Examples.

[0046] FIG. 20 is a bar graph showing hepatic editing of TTR gene by LNP3 in NHPs as described in the Examples.

[0047] FIG. 21 is a plot showing serum TTR protein changes measured by ELISA in NHP treated with LNP3 as described in the Examples.

[0048] FIG. 22 is a plot showing serum TTR protein changes measured by liquid chromatography-mass spectrometry in NHP treated with LNP3 as described in the Examples.

[0049] FIGS. 23A-23B are a bar graphs showing serum Alanine Aminotransferase (ALT), FIG. 23A, and serum Aspartate Aminotransferase (AST), FIG. 23B, concentrations in NHP treated with LNP3 as described in the Examples.

[0050] FIGS. 24A-24B are a bar graphs showing serum Lactate Dehydrogenase (LDH), FIG. 24A, and serum Glutamate Dehydrogenase (GDH), FIG. 24B, concentrations in NHP treated with LNP3 as described in the Examples.

[0051] FIGS. 25A-25B are a bar graphs showing serum Gamma-Glutamyl Transferase (GGT), FIG. 25A, and serum Alkaline Phosphatase (AP), FIG. 25B, concentrations in NHP treated with LNP3 as described in the Examples.

[0052] FIG. 26 is a bar graph showing serum total bilirubin concentrations in NHP treated with LNP2 as described in the Examples.

[0053] FIG. 27 is a bar graph showing serum creatine kinase concentrations in NHP treated with LNP3 as described in the examples.

[0054] FIGS. 28A-28B are plots of plasma pharmacokinetic profiles of iLipid (FIG. 28A) and PEG lipids (FIG. 28B) in NHP treated with LNP1 and LNP2 as described in the Examples.

### DETAILED DESCRIPTION OF ILLUSTRATIVE EMBODIMENTS

[0055] Provided herein are compositions for gene modification or editing and methods of using the same to treat or prevent conditions associated with the extracellular deposition in various tissues of amyloid fibrils formed by the aggregation of misfolded transthyretin (TTR) proteins. Such conditions include, but are not limited to, polyneuropathy due to hereditary transthyretin amyloidosis (hATTR-PN) and hereditary cardiomyopathy due to transthyretin amyloidosis (hATTR-CM), both associated with autosomal dominant mutations of the TTR gene, and an age-related cardiomyopathy associated with wild-type TTR proteins (ATTRwt), also known as senile cardiac amyloidosis. Compositions and methods directed to editing the TTR gene using an editing system such as one comprising a base editor and guide RNAs are disclosed.

### Definitions

[0056] The following presents definitions of some terms presented throughout this disclosure. In some instances, terms are defined in areas of this specification other than in this “Definitions” section.

[0057] As used in this specification and the appended claims, the singular forms “a,” “an,” and “the” include plural referents unless the content clearly dictates otherwise. It should also be noted that the term “or” is generally employed in its sense including “and/or” unless the content clearly dictates otherwise. The terms “and/or” and “any combination thereof” and their grammatical equivalents as used herein, can be used interchangeably. These terms can convey that any combination is specifically contemplated. Solely for illustrative purposes, the following phrases “A, B, and/or C” or “A, B, C, or any combination thereof” can mean “A individually; B individually; C individually; A and B; B and C; A and C; and A, B, and C.” The term “or” can be used conjunctively or disjunctively unless the context specifically refers to a disjunctive use.

[0058] The term “about” or “approximately” can mean within an acceptable error range for the particular value as determined by one of ordinary skill in the art, which will depend in part on how the value is measured or determined, i.e., the limitations of the measurement system. For example, “about” can mean within 1 or more than 1 standard deviation, per the practice in the art. Alternatively, “about” can mean a range of up to 20%, up to 10%, up to 5%, or up to 1% of a given value. Alternatively, particularly with respect to biological systems or processes, the term can mean within an order of magnitude, within 5-fold, and more preferably within 2-fold, of a value. Where particular values are described in the application and claims, unless otherwise stated, the term “about” means within an acceptable error range for the particular value should be assumed.

[0059] As used in this specification and claim(s), the words “comprising” (and any form of comprising, such as “comprise” and “comprises”), “having” (and any form of having, such as “have” and “has”), “including” (and any form of including, such as “includes” and “include”) or “containing” (and any form of containing, such as “contains” and “contain”) are inclusive or open-ended and do not exclude additional, unrecited elements or method steps. It is contemplated that any embodiment discussed in this specification can be implemented with respect to any method or composition of the present disclosure, and vice versa. Furthermore, compositions of the present disclosure can be used to achieve methods of the present disclosure.

[0060] An article, composition, method, or the like that comprises one or more elements may consist of the one or more elements or may consist essentially of the one or more elements. As used in this specification and claim(s), “consisting of” (and any form of consisting of, such as “consists of” and “consist of”) means including and limited to. As used in this specification and claim(s), an article, composition, method, or the like “consisting essentially of” (and any form of consisting essentially of, such as “consists essentially of” and “consist essentially of”) means the article, composition, method, or the like includes the specified enumerated elements; such as components, compounds, materials, steps, or the like, and may include additional elements that do not materially affect the basic and novel characteristics of the article, composition, method, or the like.

[0061] Reference in the specification to “some embodiments,” “an embodiment,” “one embodiment,” “embodiments” or “other embodiments” means that a particular feature, structure, or characteristic described in connection with the embodiments is included in at least some embodiments, but not necessarily all embodiments, of the present disclosures.

[0062] The words “preferred” and “preferably” refer to embodiments of the invention that may afford certain benefits, under certain circumstances. However, other embodiments may also be preferred, under the same or other circumstances. Furthermore, the recitation of one or more preferred embodiments does not imply that other embodiments are not useful and is not intended to exclude other embodiments from the scope of the invention.

[0063] The term “nucleic acid” as used herein refers to a polymer containing at least two nucleotides (i.e., deoxyribonucleotides or ribonucleotides) in either single- or double-stranded form and includes DNA and RNA. “Nucleotides” contain a sugar deoxyribose (DNA) or ribose (RNA), a base, and a phosphate group. Nucleotides are linked together through the phosphate groups. “Bases” include purines and pyrimidines, which further include natural compounds adenine, thymine, guanine, cytosine, uracil, inosine, and natural analogs, and synthetic derivatives of purines and pyrimidines, which include, but are not limited to, modifications which place new reactive groups such as, but not limited to, amines, alcohols, thiols, carboxylates, and alkylhalides. Nucleic acids include nucleic acids containing known nucleotide analogs or modified backbone residues or linkages or modified sugar residues, or non-canonical/chemically-modified nucleobases and combinations thereof, which are synthetic, naturally occurring, and non-naturally occurring, and which have similar binding properties as the reference nucleic acid. Examples of such analogs and/or modified residues include, without limitation, phosphorothioates, phosphoramidates, methyl phosphonates, chiral-methyl phosphonates, 2′-O-methyl ribonucleotides, and peptide-nucleic acids (PNAs).

[0064] The term “nucleic acid” includes any oligonucleotide or polynucleotide, with fragments containing up to 60 nucleotides generally termed oligonucleotides, and longer fragments termed polynucleotides. A deoxyribooligonucleotide consists of a 5-carbon sugar called deoxyribose joined covalently to phosphate at the 5′ and 3′ carbons of this sugar to form an alternating, unbranched polymer. DNA may be in the form of, e.g., antisense molecules, plasmid DNA, pre-condensed DNA, a PCR product, vectors, expression cassettes, chimeric sequences, chromosomal DNA, or derivatives and combinations of these groups. A ribooligonucleotide consists of a similar repeating structure where the 5-carbon sugar is ribose. Accordingly, the terms “polynucleotide” and “oligonucleotide” can refer to a polymer or oligomer of nucleotide or nucleoside monomers consisting of naturally-occurring bases, sugars and intersugar (backbone) linkages. The terms “polynucleotide” and “oligonucleotide” can also include polymers or oligomers comprising non-naturally occurring monomers, or portions thereof, which function similarly. Such modified or substituted oligonucleotides are often preferred over native forms because of properties such as, for example, enhanced cellular uptake, reduced immunogenicity, and increased stability in the presence of nucleases. It should be understood that the terms “polynucleotide” and “oligonucleotide” can also include polymers or oligomers comprising both deoxy and ribonucleotide combinations or variants thereof in combination with backbone modifications, such as those described herein.

[0065] The “nucleic acid” described herein may include one or more nucleotide variants, including nonstandard nucleotide(s), non-natural nucleotide(s), nucleotide analog(s), and/or modified nucleotides. Examples of modified nucleotides include, but are not limited to diaminopurine, 5-fluorouracil, 5-bromouracil, 5-chlorouracil, 5-iodouracil, hypoxanthine, xantine, 4-acetylcytosine, 5-(carboxyhydroxylmethyl)uracil, 5-carboxymethylaminomethyl-2-thiouridine, 5-carboxymethylaminomethyluracil, dihydrouracil, beta-D-galactosylqueosine, inosine, N6-isopentenyladenine, 1-methylguanine, 1-methylinosine, 2,2-dimethylguanine, 2-methyladenine, 2-methylguanine, 3-methylcytosine, 5-methylcytosine, N6-adenine, 7-methylguanine, 5-methylaminomethyluracil, 5-methoxyaminomethyl-2-thiouracil, beta-D-mannosylqueosine, 5′-methoxycarboxymethyluracil, 5-methoxyuracil, 2-methylthio-N6-isopentenyladenine, uracil-5-oxyacetic acid (v), wybutoxosine, pseudouracil, queosine, 2-thiocytosine, 5-methyl-2-thiouracil, 2-thiouracil, 4-thiouracil, 5-methyluracil, uracil-5-oxyacetic acid methylester, 5-methyl-2-thiouracil, 3-(3-amino-3-N-2-carboxypropyl) uracil, (acp3)w, 2,6-diaminopurine and the like. In some cases, nucleotides may include modifications in their phosphate moieties, including modifications to a triphosphate moiety. Non-limiting examples of such modifications include phosphate chains of greater length (e.g., a phosphate chain having, 4, 5, 6, 7, 8, 9, 10 or more phosphate moieties) and modifications with thiol moieties (e.g., alpha-thiotriphosphate and beta-thiotriphosphates).

[0066] The nucleic acid described herein may be modified at the base moiety (e.g., at one or more atoms that typically are available to form a hydrogen bond with a complementary nucleotide and/or at one or more atoms that are not typically capable of forming a hydrogen bond with a complementary nucleotide), sugar moiety, or phosphate backbone. Backbone modifications can include, but are not limited to, a phosphorothioate, a phosphorodithioate, a phosphoroselenoate, a phosphorodiselenoate, a phosphoroanilothioate, a phosphoraniladate, a phosphoramidate, and a phosphorodiamidate linkage. A phosphorothioate linkage substitutes a sulfur atom for a non-bridging oxygen in the phosphate backbone and delay nuclease degradation of oligonucleotides. A phosphorodiamidate linkage (N3′→P5′) prevents nuclease recognition and degradation. Backbone modifications can also include peptide bonds instead of phosphorous in the backbone structure (e.g., N-(2-aminoethyl)-glycine units linked by peptide bonds in a peptide nucleic acid), or linking groups including carbamate, amides, and linear and cyclic hydrocarbon groups. Oligonucleotides with modified backbones are reviewed in Micklefield, Curr. Med. Chem., 8 (10): 1157-79, 2001 and Lyer et al., Curr. Opin. Mol. Ther., 1 (3): 344-358, 1999. Nucleic acid molecules described herein may contain a sugar moiety that comprises ribose or deoxyribose, as present in naturally occurring nucleotides, or a modified sugar moiety or sugar analog. Modified sugar moieties include, but are not limited to, 2′-O-methyl, 2′-O-methoxyethyl, 2′-O-aminoethyl, 2′-Flouro, N3′→P5′ phosphoramidate, 2′dimethylaminooxyethoxy, 2′ 2′dimethylaminoethoxyethoxy, 2′-guanidinidium, 2′-O-guanidinium ethyl, carbamate modified sugars, and bicyclic modified sugars. 2′-O-methyl or 2′-O-methoxyethyl modifications promote the A-form or RNA-like conformation in oligonucleotides, increase binding affinity to RNA, and have enhanced nuclease resistance. Modified sugar moieties can also include having an extra bridge bond (e.g., a methylene bridge joining the 2′-O and 4′-C atoms of the ribose in a locked nucleic acid) or sugar analog such as a morpholine ring (e.g., as in a phosphorodiamidate morpholino).

[0067] Unless otherwise indicated, a particular nucleic acid sequence also implicitly encompasses conservatively modified variants thereof (e.g., degenerate codon substitutions), alleles, orthologs, SNPs, and complementary sequences as well as the sequence explicitly indicated. Specifically, degenerate codon substitutions may be achieved by generating sequences in which the third position of one or more selected (or all) codons is substituted with mixed-base and/or deoxyinosine residues (Batzer et al., Nucleic Acid Res., 19:5081 (1991); Ohtsuka et al., J. Biol. Chem., 260:2605-2608 (1985); Rossolini et al., Mol. Cell. Probes, 8:91-98 (1994)).

[0068] The present disclosure encompasses isolated or substantially purified nucleic acid molecules and compositions containing those molecules. As used herein, an “isolated” or “purified” DNA molecule or RNA molecule is a DNA molecule or RNA molecule that exists apart from its native environment. An isolated DNA molecule or RNA molecule may exist in a purified form or may exist in a non-native environment such as, for example, a transgenic host cell. For example, an “isolated” or “purified” nucleic acid molecule or biologically active portion thereof, is substantially free of other cellular material, or culture medium when produced by recombinant techniques, or substantially free of chemical precursors or other chemicals when chemically synthesized. In one embodiment, an “isolated” nucleic acid is free of sequences that naturally flank the nucleic acid (i.e., sequences located at the 5′ and 3′ ends of the nucleic acid) in the genomic DNA of the organism from which the nucleic acid is derived.

[0069] As used herein, the terms “protein,” “polypeptide,” and “peptide” are used interchangeably and refer to a polymer of amino acid residues linked via peptide bonds and which may be composed of two or more polypeptide chains. The terms “polypeptide,” “protein,” and “peptide” refer to a polymer of at least two amino acid monomers joined together through amide bonds. An amino acid may be the L-optical isomer or the D-optical isomer. More specifically, the terms “polypeptide,” “protein,” and “peptide” refer to a molecule composed of two or more amino acids in a specific order; for example, the order as determined by the base sequence of nucleotides in the gene or RNA coding for the protein. Proteins are essential for the structure, function, and regulation of the body's cells, tissues, and organs, and each protein has unique functions. Examples are hormones, enzymes, antibodies, and any fragments thereof. In some cases, a protein can be a portion of the protein, for example, a domain, a subdomain, or a motif of the protein. In some cases, a protein can be a variant (or mutation) of the protein, wherein one or more amino acid residues are inserted into, deleted from, and/or substituted into the naturally occurring (or at least a known) amino acid sequence of the protein. A protein or a variant thereof can be naturally occurring or recombinant. Methods for detection and/or measurement of polypeptides in biological material are well known in the art and include, but are not limited to, Western-blotting, flow cytometry, ELISAs, RIAs, and various proteomics techniques. An exemplary method to measure or detect a polypeptide is an immunoassay, such as an ELISA. This type of protein quantitation can be based on an antibody capable of capturing a specific antigen, and a second antibody capable of detecting the captured antigen.

[0070] The term “subject” or “patient” encompasses mammals. Examples of mammals include, but are not limited to, any member of the mammalian class: humans, non-human primates such as chimpanzees, and other apes and monkey species; farm animals such as cattle, horses, sheep, goats, swine; domestic animals such as rabbits, dogs, and cats; laboratory animals including rodents, such as rats, mice and guinea pigs, and the like.

[0071] “A subject in need thereof” refers to an individual who has a disease, a symptom of the disease, or a predisposition toward the disease, with the purpose to cure, heal, alleviate, relieve, alter, remedy, ameliorate, improve, or affect the disease, the symptom of the disease, or the predisposition toward the disease. In some embodiments, the subject has hereditary transthyretin amyloidosis (hATTR). In some embodiments, the subject has cardiomyopathy due to transthyretin arnyloidosis (ATTR-CM). In some embodiments, the subject has polyneuropathy due to transthyretin amyloidosis (ATTR-PN). In some embodiments, the subject has wild-type ATTR (ATTRwt), the age-related deposition of wild type TTR protein (formerly known as senile amyloidosis).

[0072] “Administering” and its grammatical equivalents as used herein can refer to providing one or more replication competent recombinant adenovirus or pharmaceutical compositions described herein to a subject or a patient. By way of example and without limitation, “administering” can be performed by intravenous (i.v.) injection, sub-cutaneous (s.c.) injection, intradermal (i.d.) injection, intraperitoneal (i.p.) injection, intramuscular (i.m.) injection, intravascular injection, intracerebroventricular (i.c.v.) injection, intrathecal (i.t.) injection, infusion (inf.), oral routes (p.o.), topical (top.) administration, or rectal (p.r.) administration. One or more such routes can be employed.

[0073] The term “parenteral” as used herein includes subcutaneous, intracutaneous, intravenous, intramuscular, intraarticular, intraarterial, intrasynovial, intrasternal, intracerebroventricular, intrathecal, intralesional, and intracranial injection or infusion techniques. Parenteral administration can be, for example, by bolus injection or by gradual perfusion over time. In addition, it can be administered to the subject via injectable depot routes of administration such as using 1-, 3-, or 6-month depot injectable or biodegradable materials and methods.

[0074] The terms “treat,” “treating,” or “treatment,” and its grammatical equivalents as used herein, can include alleviating, abating, or ameliorating at least one symptom of a disease or a condition, preventing additional symptoms, inhibiting the disease or the condition, e.g., arresting the development of the disease or the condition, relieving the disease or the condition, causing regression of the disease or the condition, relieving a condition caused by the disease or the condition, or stopping the symptoms of the disease or the condition either prophylactically and/or therapeutically. “Treating” may refer to administration of a composition comprising a nanoparticle, such as a lipid nanoparticle (LNP), to a subject after the onset, or suspected onset, of a disease or condition. “Treating” includes the concepts of “alleviating,” which refers to lessening the frequency of occurrence or recurrence, or the severity, of any symptoms or other ill effects related to a disease or condition and/or the side effects associated with the disease or condition. The term “treating” also encompasses the concept of “managing” which refers to reducing the severity of a particular disease or disorder in a patient or delaying its recurrence, e.g., lengthening the period of remission in a patient who had suffered from the disease. The term “treating” further encompasses the concept of “prevent,” “preventing,” and “prevention.” It is appreciated that, although not precluded, treating a disorder or condition does not require that the disorder, condition, or symptoms associated therewith be completely eliminated.

[0075] As used herein, the terms “prevent,” “preventing,” “prevention,” and the like, refer to reducing the probability of developing a disease or condition in a subject, who does not have, but is at risk of or susceptible to developing a disease or condition.

[0076] The term “ameliorate” as used herein can refer to decrease, suppress, attenuate, diminish, arrest, or stabilize the development or progression of a disease.

[0077] As used therein, “delaying” the development of a disease means to defer, hinder, slow, retard, stabilize, and/or postpone progression of the disease. This delay can be of varying lengths of time, depending on the history of the disease and/or individuals being treated. A method that “delays” or alleviates the development of a disease, or delays the onset of the disease, is a method that reduces probability of developing one or more symptoms of the disease in a given time frame and/or reduces extent of the symptoms in a given time frame, when compared to not using the method. Such comparisons are typically based on clinical studies, using a number of subjects sufficient to give a statistically significant result.

[0078] “Development” or “progression” of a disease means initial manifestations and/or ensuing progression of the disease. Development of the disease can be detectable and assessed using standard clinical techniques as well known in the art. However, development also refers to progression that may be undetectable. For purpose of this disclosure, development or progression refers to the biological course of the symptoms. “Development” includes occurrence, recurrence, and onset.

[0079] As used herein “onset” or “occurrence” of a disease includes initial onset and/or recurrence.

[0080] The term “therapeutic agent” can refer to any agent that, when administered to a subject, has a therapeutic, diagnostic, and/or prophylactic effect and/or elicits a desired biological and/or pharmacological effect. Therapeutic agents can also be referred to as “actives” or “active agents.” Such agents include, but are not limited to, cytotoxins, radioactive ions, chemotherapeutic agents, small molecule drugs, proteins, and nucleic acids.

[0081] The terms “pharmaceutical composition” and its grammatical equivalents as used herein can refer to a mixture or solution comprising a therapeutically effective amount of an active pharmaceutical ingredient together with one or more pharmaceutically acceptable excipients, carriers, and/or a therapeutic agent to be administered to a subject, e.g., a human in need thereof.

[0082] The term “pharmaceutically acceptable” and its grammatical equivalents as used herein can refer to an attribute of a material which is useful in preparing a pharmaceutical composition that is generally safe, non-toxic, and neither biologically nor otherwise undesirable and is acceptable for veterinary as well as human pharmaceutical use. “Pharmaceutically acceptable” can refer to a material, such as a carrier or diluent, which does not abrogate the biological activity or properties of the compound, and is relatively nontoxic, i.e., the material may be administered to a subject without causing undesirable biological effects or interacting in a deleterious manner with any of the components of the pharmaceutical composition in which it is contained.

[0083] A “pharmaceutically acceptable excipient, carrier, or diluent” refers to an excipient, carrier, or diluent that can be administered to a subject, together with an agent, and which does not destroy the pharmacological activity thereof and is nontoxic when administered in doses sufficient to deliver a therapeutic amount of the agent.

[0084] A “pharmaceutically acceptable salt” may be an acid or base salt that is generally considered in the art to be suitable for use in contact with the tissues of human beings or animals without excessive toxicity, irritation, allergic response, or other problem or complication. Those of ordinary skill in the art will recognize from this disclosure and the knowledge in the art that further pharmaceutically acceptable salts include those listed by Remington's Pharmaceutical Sciences, 17th ed., Mack Publishing Company, Easton, PA, p. 1418 (1985).

[0085] As used herein, the term “therapeutically effective amount” means an amount of an agent to be delivered (e.g., nucleic acid, drug, payload, composition, therapeutic agent, diagnostic agent, prophylactic agent, etc.) that is sufficient, when administered to a subject suffering from or susceptible to an infection, disease, disorder, and/or condition, to treat, improve symptoms of, diagnose, prevent, and/or delay the onset of the infection, disease, disorder, and/or condition.

[0086] Ranges provided herein are understood to be shorthand for all of the values within the range. For example, a range of 1 to 50 is understood to include any number, combination of numbers, or sub-range from the group consisting of 1, 2, 3, 4, 5, 6, 7, 8, 9, 10, 11, 12, 13, 14, 15, 16, 17, 18, 19, 20, 21, 22, 23, 24, 25, 26, 27, 28, 29, 30, 31, 32, 33, 34, 35, 36, 37, 38, 39, 40, 41, 42, 43, 44, 45, 46, 47, 48, 49, or 50, as well as all intervening decimal values between the aforementioned integers such as, for example, 1.1, 1.2, 1.3, 1.4, 1.5, 1.6, 1.7, 1.8, and 1.9. With respect to sub-ranges, “nested sub-ranges” that extend from either end point of the range are specifically contemplated. For example, a nested sub-range of an exemplary range of 1 to 50 may comprise 1 to 10, 1 to 20, 1 to 30, and 1 to 40 in one direction, or 50 to 40, 50 to 30, 50 to 20, and 50 to 10 in the other direction.

[0087] Numbers expressing quantities of components, molecular weights, and so forth used in the specification and claims are to be understood as being modified in all instances by the term “about.” Accordingly, unless otherwise indicated to the contrary, the numerical parameters set forth in the specification and claims are approximations that may vary depending upon the desired properties sought to be obtained by the present invention. At the very least, and not as an attempt to limit the doctrine of equivalents to the scope of the claims, each numerical parameter should at least be construed in light of the number of reported significant digits and by applying ordinary rounding techniques.

[0088] Notwithstanding that the numerical ranges and parameters setting forth the broad scope of the invention are approximations, the numerical values set forth in the specific examples are reported as precisely as possible. All numerical values, however, inherently contain a range necessarily resulting from the standard deviation found in their respective testing measurements.

[0089] As used herein, a spacer sequence of a guide nucleic acid is considered to be “homologous” to a protospacer sequence of a target nucleic acid if a base editor of a base editor system comprising the spacer sequence is capable of making a modification to a base within the target nucleic acid. A spacer sequence that is homologous to a protospacer sequence may be identical or substantially identical to the protospacer sequence.

[0090] As used herein, a nucleic acid sequence that is “substantially identical” to another nucleic acid sequence is a nucleotide sequence that has 70% or more sequence identity to the other nucleic acid sequence.

[0091] For purposes of percent sequence identity between an RNA sequence (e.g., spacer) and a DNA sequence (e.g., target gene protospacer), uracil bases in the RNA are to be considered identical to thymine bases in DNA sequences.

[0092] As used herein “sequence identity” refers to the extent to which two optimally aligned nucleic acid sequences are invariant throughout a window of alignment of components, e.g., nucleotides. “Identity” can be readily calculated by known methods including, but not limited to, those described in: Computational Molecular Biology (Lesk, A. M., ed.) Oxford University Press, New York (1988); Biocomputing: Informatics and Genome Projects (Smith, D. W., ed.) Academic Press, New York (1993); Computer Analysis of Sequence Data, Part I (Griffin, A. M., and Griffin, H. G., eds.) Humana Press, New Jersey (1994); Sequence Analysis in Molecular Biology (von Heinje, G., ed.) Academic Press (1987); and Sequence Analysis Primer (Gribskov, M. and Devereux, J., eds.) Stockton Press, New York (1991).

[0093] As used herein, the term “percent sequence identity” or “percent identity” refers to the percentage of identical nucleotides in a linear polynucleotide sequence of a reference (“query”) nucleic acid (or its complementary strand) as compared to a test (“subject”) nucleic acid (or its complementary strand) when the two sequences are optimally aligned. Percent sequence identity may be determined, when the compared sequences are aligned for maximum correspondence, as measured using a sequence comparison algorithm described below and as known in the art, or by visual inspection.

[0094] For sequence comparison, typically one sequence acts as a reference sequence to which test sequences are compared. When using a sequence comparison algorithm, test and reference sequences are entered into a computer, subsequence coordinates are designated if necessary, and sequence algorithm program parameters are designated. The sequence comparison algorithm then calculates the percent sequence identity for the test sequence(s) relative to the reference sequence, based on the designated program parameters. Optimal alignment of sequences for aligning a comparison window are well known to those skilled in the art and may be conducted by tools such as the local homology algorithm of Smith and Waterman, the homology alignment algorithm of Needleman and Wunsch, the search for similarity method of Pearson and Lipman, and optionally by computerized implementations of these algorithms such as GAP, BESTFIT, FASTA, and TFASTA available as part of the GCG® Wisconsin Package® (Accelrys Inc., San Diego, CA). An “identity fraction” for aligned segments of a test sequence and a reference sequence is the number of identical components which are shared by the two aligned sequences divided by the total number of components in the reference sequence segment, i.e., the entire reference sequence or a smaller defined part of the reference sequence. Percent sequence identity is represented as the identity fraction multiplied by 100.

[0095] “Percent identity” may also be determined using BLASTX version 2.0 for translated nucleotide sequences and BLASTN version 2.0 for polynucleotide sequences. Software for performing BLAST analyses is publicly available through the National Center for Biotechnology Information. This algorithm involves first identifying high scoring sequence pairs (HSPs) by identifying short words of length W in the query sequence, which either match or satisfy some positive-valued threshold score T when aligned with a word of the same length in a database sequence. T is referred to as the neighborhood word score threshold (Altschul et al., 1990). These initial neighborhood word hits act as seeds for initiating searches to find longer HSPs containing them. The word hits are then extended in both directions along each sequence for as far as the cumulative alignment score can be increased. Cumulative scores are calculated using, for nucleotide sequences, the parameters M (reward score for a pair of matching residues; always >0) and N (penalty score for mismatching residues; always <0). Extension of the word hits in each direction are halted when the cumulative alignment score falls off by the quantity X from its maximum achieved value, the cumulative score goes to zero or below due to the accumulation of one or more negative-scoring residue alignments, or the end of either sequence is reached. The BLAST algorithm parameters W, T, and X determine the sensitivity and speed of the alignment. The BLASTN program (for nucleotide sequences) uses as defaults a word length (W) of 11, an expectation (E) of 10, a cutoff of 100, M=5, N=−4, and a comparison of both strands.

[0096] In addition to calculating percent sequence identity, the BLAST algorithm also performs a statistical analysis of the similarity between two sequences (see, e.g., Karlin & Altschul, Proc. Nat'l. Acad. Sci. USA 90: 5873-5787 (1993)). One measure of similarity provided by the BLAST algorithm is the smallest sum probability (P(N)), which provides an indication of the probability by which a match between two nucleotide or amino acid sequences would occur by chance. For example, a test nucleic acid sequence is considered similar to a reference sequence if the smallest sum probability in a comparison of the test nucleotide sequence to the reference nucleotide sequence is less than about 0.1 to less than about 0.001.

[0097] In some embodiments, a first nucleotide sequence that is homologous to a second nucleotide sequence may hybridize to the complimentary sequence of the second nucleotide sequence under stringent conditions or highly stringent conditions. “Stringent hybridization conditions” and “stringent hybridization wash conditions” in the context of nucleic acid hybridization are sequence dependent and are different under different environmental parameters. An extensive guide to the hybridization of nucleic acids is found in Tijssen, Laboratory Techniques in Biochemistry and Molecular Biology-Hybridization with Nucleic Acid Probes part I chapter 2 “Overview of principles of hybridization and the strategy of nucleic acid probe assays” Elsevier, New York (1993). Generally, highly stringent hybridization and wash conditions are selected to be about 5° C. lower than the thermal melting point (Tm) for the specific sequence at a defined ionic strength and pH. The Tm is the temperature (under defined ionic strength and pH) at which 50% of the target sequence hybridizes to a perfectly matched probe. Very stringent conditions are selected to be equal to the Tm for a particular probe. An example of stringent hybridization conditions for hybridization of complementary nucleotide sequences which have more than 100 complementary residues on a filter in a Southern or Northern blot is 50% formamide with 1 mg of heparin at 42° C., with the hybridization being carried out overnight. An example of highly stringent wash conditions is 0.15M NaCl at 72° C. for about 15 minutes. An example of stringent wash conditions is a 0.2×SSC wash at 65° C. for 15 minutes (see, Sambrook and Russel, Molecular Cloning: A laboratory Manual, 3^{rd} ed., Cold Spring Harbor Laboratory Press, 2001 for a description of SSC buffer). Often, a high stringency wash is preceded by a low stringency wash to remove background probe signal. An example of a medium stringency wash for a duplex of, e.g., more than 100 nucleotides, is 1×SSC at 45° C. for 15 minutes. An example of a low stringency wash for a duplex of, e.g., more than 100 nucleotides, is 4-6×SSC at 40° C. for 15 minutes. For short probes (e.g., about 10 to 50 nucleotides), stringent conditions typically involve salt concentrations of less than about 1.0 M Na ion, typically about 0.01 to 1.0 M Na ion concentration (or other salts) at pH 7.0 to 8.3, and the temperature is typically at least about 30° C. Stringent conditions can also be achieved with the addition of destabilizing agents such as formamide.

[0098] In several places throughout the application, guidance is provided through examples, which examples, including the particular aspects thereof, can be used in various combinations and be the subject of claims. In each instance, the recited list serves only as a representative group and should not be interpreted as an exclusive list. It is to be understood that the particular examples, materials, amounts, and procedures are to be interpreted broadly in accordance with the scope and spirit of the invention as set forth herein.

[0099] For any method disclosed herein that includes discrete steps, the steps may be conducted in any feasible order. And, as appropriate, any combination of two or more steps may be conducted simultaneously.

[0100] All headings throughout are for the convenience of the reader and should not be used to limit the meaning of the text that follows the heading, unless so specified.

### Transthyretin Protein and Gene

[0101] Transthyretin (TTR), originally known as prealbumin, is a 55-kDa transport protein for both thyroxine (T4) and retinol-binding protein, that circulates in soluble form in the serum and cerebrospinal fluid (CSF) of healthy humans. TTR is understood to be primarily synthesized in the liver. Under normal conditions, TTR circulates as a homotetramer with a central channel. The wild-type TTR monomer is 147 amino acids in length and has the amino acid sequence below:

(SEQ ID NO: 23)

MASHRLLLLC LAGLVFVSEA GPTGTGESKC PLMVKVLDAV
RGSPAINVAV HVFRKAADDT WEPFASGKTS ESGELHGLTT
EEEFVEGIYK VEIDTKSYWK ALGISPFHEH AEVVFTANDS
GPRRYTIAAL LSPYSYSTTA VVTNPKE.

[0102] The TTR gene, composed of four exons, is located on chromosome 18 at 18q12.1. The full sequence of the human TTR gene is shown in FIG. 4 and is also available at UniProtKB—P02766 (TTHY_HUMAN). Over 120 TTR variants have so far been identified, the great majority of which are pathogenic. The most common pathogenic variant consists of a point mutation leading to replacement of valine by methionine at position 30 of the mature protein. This Val30Met mutation is responsible for hATTR amyloidosis and is the most frequent amyloidogenic mutation worldwide, accounting for about 50% of TTR variants.

[0103] Hereditary transthyretin amyloidosis (hATTR) is a disease caused by mutations in the TTR gene. Autosomal dominant mutations destabilize the TTR tetramer and enhance dissociation into monomers, resulting in misfolding, aggregation, and the subsequent extracellular deposition of TTR amyloid fibrils in different tissue sites. This multisystem extracellular deposition of amyloid (amyloidosis) results in dysfunction of different organs and tissues. In particular, polyneuropathy due to transthyretin amyloidosis (ATTR-PN) and cardiomyopathy due to transthyretin amyloidosis (ATTR-CM) are severe disorders associated with significant morbidity and mortality.

[0104] When there is clinical suspicion for hATTR-PN, diagnosis is typically done by tissue biopsy with staining for amyloid, amyloid typing (using immunohistochemistry or mass spectrometry), and/or TTR gene sequencing. When there is clinical suspicion for ATTR-CM, the key diagnostic tools are either endomyocardial biopsy (with tissue staining and amyloid typing by immunohistochemistry or mass spectrometry) or 99mtechnetium-pyrophosphate scan. Both of these approaches can provide a diagnosis of ATTR-CM. TTR gene sequencing can be used to differentiate between the hATTR-CM (mutation positive) and ATTRwt-CM (mutation negative).

[0105] The compositions described herein include a spacer having a nucleotide sequence that functions as a guide to direct a gene editing protein (e.g., a base editor) to alter the TTR gene, for example by introducing one or more nucleobase alterations in the TTR gene. These point mutations may be used to disrupt gene function, by the introduction of a missense mutation(s) that results in production of a less functional, or non-functional protein, thus silencing the TTR gene. Alternatively, it is contemplated herein that corrections to one or more point mutation(s) may be made using a gene editing protein to alter a mutated gene to correct the underlying mutation causing the dysfunction in the TTR gene or otherwise mitigate against dysfunction of the gene.

### Gene Editing/Gene Modification

[0106] The term “gene editing” or “gene modification” and its grammatical equivalents as used herein refers to genetic engineering in which one or more nucleotides are inserted, replaced, or removed from a genome. Gene editing can be performed using a nuclease (e.g., a natural-existing nuclease or an artificially engineered nuclease). Gene modification can include introducing a double stranded break, a non-sense mutation, a frameshift mutation, a splice site alteration, or an inversion in a polynucleotide sequence, e.g., a target polynucleotide sequence. FIG. 1A depicts a crispr Cas9 protein which is an RNA-guided endonuclease that can be used to impart a double-stranded break at a site-specific location in DNA or a gene. Gene modification can also be accomplished using other editors, such as base editors.

### Base Editors

[0107] A base editor (BE) or nucleobase editor (NBE) refers to an agent comprising a polypeptide that is capable of making a modification to a base (e.g., A, T, C, G, or U) within a nucleic acid sequence (e.g., DNA or RNA). A base editor may comprise a macromolecule or macromolecular complex that is capable of converting a nucleobase in a polynucleic acid sequence into another nucleobase (e.g., a transition or transversion) in one location or two or more locations within a base editing window. A base editor may comprise a combination of (a) a nucleotide-, nucleoside-, or nucleobase-converting enzyme and (b) a nucleic acid binding protein that can be programmed to bind to a specific nucleic acid sequence. The nucleic acid binding protein may be catalytically inactivated or impaired such that it does not cleave a single stranded nucleic acid target or such that it nicks or cleaves at most one strand of a double stranded nucleic acid target.

[0108] A base editor may comprise a polynucleotide programmable DNA binding domain fused or linked to a domain having base editing activity, resulting in a base editor fusion protein. The base editor fusion protein may comprise one or more linkers, for example, peptide linkers between the domains. In some embodiments, the domain having base editing activity is linked to the guide RNA (e.g., via an RNA binding motif on the guide RNA and an RNA binding domain fused to the deaminase).

[0109] In some embodiments, a base editor is a class of modular programmable proteins comprising a deaminase domain fused to a catalytically impaired CRISPR-Cas enzyme. Adenine base editors (ABEs) convert A:T to G:C base pairs and cytosine base editors (CBEs) convert C:G to T:A base pairs, through hydrolytic deamination and subsequent cellular processing without generating double-stranded DNA breaks. The respective deaminases of base editors are directed to the site of interest by a guide RNA (gRNA) within the D10A nickase Cas9 (nCas9). Cytidine deaminase enzyme of a CBE directs conversion of cytosine to uridine, thereby effecting a C→T (or G→A) substitution (see FIG. 1B). “Cytidine deaminase” is used herein to refer to a deaminase enzyme that acts on deoxycytidine, on cytidine, or both on deoxycytidine and on cytidine to convert cytosine to uridine. Cytidine deaminase and cytosine deaminase may be used interchangeably herein. Where the goal is to disrupt a gene in vivo for a therapeutic purpose, cytosine base editors (CBE) are capable of potentially being able to directly introduce stop codons into the coding sequence of the gene (nonsense mutations) by altering specific codons for glutamine (CAG→TAG, CAA→TAA), arginine (CGA→TGA), and tryptophan (TGG→TAG/TAA/TGA, with editing of cytosines on the antisense strand).

[0110] In comparison, the adenosine deaminase enzyme of an ABE directs conversion of adenosine to inosine, thereby effecting a A→G (or T→C) substitution (see FIG. 1B). “Adenosine deaminase” is used herein to refer to a deaminase enzyme that acts on deoxyadenosine, on adenosine, or both on deoxyadenosine and on adenosine to convert adenine to hypoxanthine or, alternatively, adenosine to inosine. Because the structure of inosine is the similar to guanosine (inosine does not include an exocyclic amino group of guanosine), inosine tends to behave as guanosine. Inosine is eventually replaced by guanosine through subsequent cellular processing. Accordingly, adenosine deaminase effects an A→G (or T→C) substitution. Adenosine deaminase and adenine deaminase may be used interchangeably herein. Adenine base editors (ABE) cannot directly introduce stop codons, as there are no A→G changes that result in nonsense mutations.

[0111] Adenine base editors can be used, for example, to disrupt gene function by editing the start codon, from either ATG→GTG or ATG→ACG. A second strategy by which adenine base editors can disrupt gene function is by editing splice sites, whether splice donors at the 5′ ends of introns or splice acceptors at the 3′ ends of introns. Splice site disruption can result in the inclusion of intronic sequences in messenger RNA (mRNA), potentially introducing nonsense, frameshift, or in-frame mutations that result in premature stop codons or in insertion/deletion of amino acids that disrupt protein activity, or in the exclusion of exonic sequences, potentially introducing nonsense, frameshift, or in-frame indel mutations.

[0112] As shown in FIG. 2, canonical splice donors comprise the DNA sequence GT on the sense strand, whereas canonical splice acceptors comprise the DNA sequence AG. Alteration of the sequence disrupts normal splicing. Splice donors can be disrupted by adenine base editing of the complementary base in the second position in the antisense strand (GT→GC), and splice acceptors can be disrupted by adenine base editing of the first position in the sense strand (AG→GG).

[0113] Adenine base editors (ABE) include, but are not limited to, ABE8.8 (Gaudelli et al., Nat Biotechnol. 2020 July; 38(7):892-900. doi: 10.1038/s41587-020-0491-6. Epub 2020 Apr. 13)).

[0114] In embodiments, an adenine base editor is encoded by mRNA comprising the sequence of MA004 mRNA shown in Table 11. In embodiments, the adenine base editor is encoded by mRNA comprising a sequence having 50% or more sequence identity to MA004 mRNA shown in Table 11, 60% or more sequence identity to MA004 mRNA shown in Table 11, 70% or more sequence identity to MA004 mRNA shown in Table 11, 75% or more sequence identity to MA004 mRNA shown in Table 11, 80% or more sequence identity to MA004 mRNA shown in Table 11, 85% or more sequence identity to MA004 mRNA shown in Table 11, 90% or more sequence identity to MA004 mRNA shown in Table 11, 95% or more sequence identity to MA004 mRNA shown in Table 11, 96% or more sequence identity to MA004 mRNA shown in Table 11, 97% or more sequence identity to MA004 mRNA shown in Table 11, 98% or more sequence identity to MA004 mRNA shown in Table 11, or 99% or more sequence identity to MA004 mRNA shown in Table 11.

[0115] ABE7.10 (Gaudelli et al., Nature. 2017 Nov. 23; 551(7681):464-471. doi: 10.1038/nature24644), and other ABE variants containing Streptococcus pyogenes Cas9. The CRISPR Journal, Volume 4, Number 2, 2021 pp. 169-177 and Supplementary Figures S1-s9, Supplementary Data S4-S6, and Supplementary Table S1-S2 discloses additional inlaid base editors (IBEs) variants.

[0116] In some embodiments, a base editor may convert C:G to G:C base pairs. Examples of such base editors are disclosed in (a) Chen et al. Programmable C:G to G:C genome editing with CRISPR-Cas9-directed base excision repair proteins. Nat Commun 12, 1384 (2021), doi:10.1038/s41467-021-21559-9. Epub 2021 Mar. 2; (b) Kurt, I. C., Zhou, R., Iyer, S. et al CRISPR C-to-G base editors for inducing targeted DNA transversions in human cells. Nat Biotechnol 39, 41-46 (2021). doi: 10.1038/s41587-020-0609-x. Epub 2020 Jul. 20; and (c) Zhao, D., Li, J., Li, S. et al. Glycosylase base editors enable C-to-A and C-to-G base changes. Nat Biotechnol 39, 35-40 (2021). doi: 10.1038/s41587-020-0592-2. Epub 2020 Jul. 20. Such base editors may comprise a Cas9 nickase and a cytidine deaminase. Such base editors may further comprise a uracil-DNA glycosylase, a DNA repair protein such as XRCC1, DNA ligase S, or DNA binding and ligase domains of DNA polymerase β.

[0117] In some embodiments, a base editor may convert C:G to A:T base pairs. An example of such a base editor is disclosed in Zhao, D., Li, J., Li, S. et al. Glycosylase base editors enable C-to-A and C-to-G base changes. Nat Biotechnol 39, 35-40 (2021). doi: 10.1038/s41587-020-0592-2. Epub 2020 Jul. 20. Such base editors may comprise a Cas9 nickase and a cytidine deaminase. Such base editors may further comprise a uracil-DNA glycosylase.

[0118] The term “base editor system” refers to a system for editing a nucleobase of a target nucleotide sequence. In various embodiments, the base editor system comprises (1) a polynucleotide programmable nucleotide binding domain (e.g., Cas9); (2) a deaminase domain (e.g., an adenosine deaminase or a cytidine deaminase) for deaminating said nucleobase; and (3) one or more guide polynucleotide (e.g., guide RNA). In some embodiments, the base editor system comprises a base editor fusion protein comprising (1) and (2), or a polynucleotide (e.g., mRNA) encoding the base editor fusion protein comprising (1) and (2). In some embodiments, the polynucleotide programmable nucleotide binding domain is a polynucleotide programmable DNA binding domain. In some embodiments, the base editor is an adenine or adenosine base editor (ABE). In some embodiments, the base editor is a cytosine base editor (CBE).

[0119] Genome-editing systems include clustered regularly interspaced short palindromic repeats (CRISPR)/Cas system. Exemplary guide nucleotide sequence-programmable DNA-binding proteins include, but are not limited to, Cas9 (e.g., dCas9 and nCas9), saCas9 (e.g., saCas9d, saCas9d, saKKH Cas9) CasX, CasY, Cpf1, C2c1, C2c2, C2c3, Argonaute, and any other suitable protein described herein, or suitable variants thereof.

[0120] Through the use of a guide RNA (gRNA) with a sequence homologous to that of a sequence of DNA in the target genome (known as the protospacer) adjacent to a specific protospacer-adjacent motif (PAM) comprising the sequence NGG (N is any standard base) in the DNA, Cas9 can be used to create a double-strand break (DSB) at the targeted sequence. Non-homologous end joining (NHEJ) at DSBs is capable of creating indels and potentially knocking out genes at genetic loci; likewise, homology-directed repair (HDR), with an introduced template DNA, may insert genes or modify the targeted sequence.

[0121] A variety of Cas9-based tools have been developed in recent years. Methods of using guide nucleotide sequence-programmable DNA-binding protein, such as Cas9, for site-specific cleavage (e.g., to modify a genome) have been described (see e.g., Cong et al., Science 339, 819-823 (2013); Mali et al., Science 339, 823-826 (2013); Hwang et al., Nature Biotechnology 31, 227-229 (2013); Jinek et al., eLife 2, e00471 (2013); Dicarlo et al., Nucleic Acids Research (2013); and Jiang et al., Nature Biotechnology 31, 233-239 (2013).

[0122] In 2016, Komor et al. described the use of CRISPR-Cas9 to convert a cytosine base to a thymine base without the introduction of a template DNA strand and without the need for DSBs (Komor et al., Nature, 2016, 533: 420-4). After the cytidine deaminase domain of rat APOBEC1 was fused to the N-terminus of catalytically-dead Cas9 (dCas9) using the linker XTEN (resulting in a fusion protein called base editor 1, or BE1), conversion of cytosine to uracil was observed between position 4 and position 8 within the 20-nt protospacer region of DNA (or, to express it a different way, 13 to 17 nucleotides upstream of the PAM). Of note, any cytosine base within this “window” was amenable to editing, resulting in varied outcomes depending on how many and which cytosines were edited. After DNA replication or repair, each uracil was replaced by a thymine, completing the C to T base editing.

[0123] The next version of base editor (BE2) incorporated a uracil glycosylase inhibitor (UGI) fused to the C-terminus of dCas9 to help inhibit base excision repair of the uracil bases resulting from the cytidine deaminase activity (which otherwise would act to restore the original cytosine bases); this improved the efficiency of C to T base editing.

[0124] The next version of base editor (BE3) used a Cas9 nickase rather than dCas9; the nickase cut the unedited strand opposite the edited C to T bases, stimulating the removal of the opposing guanidine through eukaryotic mismatch repair. BE2 and BE3 base editing was observed in both human and murine cell lines. FIG. 1B is an illustration of BE3. The specificity of base editing has been further improved through the addition of mutations to the Cas9 nickase; in similar fashion, Cas9 has been mutated to narrow the width of the editing window from approximately 5 nucleotides to as little as 1-2 nucleotides (Rees et al., Nat Commun, 2017, 8: 15790, Kim et al., Nat Biotechnol, 2017, 35: 371-6).

[0125] By fusing Escherichia coli adenine tTNA deaminase TadA (ecTadA) to dCas9 and mutagenesis of the ecTadA domain in conjunction with selection for editing activity revealed that A106V and D108N mutations yielded a base editor capable of editing adenine to guanine in DNA, termed ABE7.10 (Gaudelli et al. Nature, 2017, 551: 464-71).

[0126] Adenine 8.8-m (also referred to herein as ABE8.8) uses its core Streptococcus pyogenes nickase Cas9 (nSpCas9) protein with a guide RNA (gRNA) to engage a double-strand protospacer DNA sequence, flanked by an NGG protospacer-adjacent motif (PAM) sequence on its 3′ end. The protospacer sequence is specified via hybridization of the first 20 bases of the gRNA with a complementary sequence on the “target” DNA strand, leaving part of the other (“non-target”) strand in exposed single-strand form structure called the R-loop. Unlike Cas9 and Cas12, ABE8.8 does not make double-strand breaks in targeted DNA sequences. Rather, as illustrated in FIG. 1C, ABE8.8 uses an evolved deoxyadenosine deaminase domain—fused to nSpCas9—to chemically modify an adenosine nucleoside, contained in the single-strand DNA portion of the R-loop, into inosine and nicks the target DNA strand within the DNA:RNA heteroduplex of the R-loop. This nick biases DNA repair machinery to use the freshly deaminated strand as a template, enabling highly efficient transition mutation at the targeted site. The activity window of ABE8.8 typically ranges from positions 3 to 9 in the protospacer DNA sequence specified by the gRNA, 12 to 18 base pairs 5′ of the NGG PAM (positions 21 to 23), with peak editing observed at position 6 of the protospacer (Gaudelli et al., Nat Biotechnol. 2020 July; 38(7):892-900).

[0127] In some embodiments, the nucleic acid encoding the base editor fusion protein is a mRNA. In some embodiments, the mRNA generates the base editor fusion protein upon translation in the targeted cell or subject after the administration. In some embodiments, the base editor fusion protein forms a ribonucleoprotein (RNP) complex in the targeted cell or subject.

[0128] It should be appreciated that the fusion proteins of the present disclosure may comprise one or more additional features. For example, in some embodiments, the fusion protein may comprise cytoplasmic localization sequences, export sequences, such as nuclear export sequences, or other localization sequences, as well as sequence tags that are useful for solubilization, purification, or detection of the fusion proteins. Suitable protein tags provided herein include, but are not limited to, biotin carboxylase carrier protein (BCCP) tags, myc-tags, calmodulin-tags, FLAG-tags, hemagglutinin (HA)-tags, polyhistidine tags, also referred to as histidine tags or His-tags, maltose binding protein (MBP)-tags, nus-tags, glutathione-S-transferase (GST)-tags, green fluorescent protein (GFP)-tags, thioredoxin-tags, S-tags, Softags (e.g., Softag 1, Softag 3), strep-tags, biotin ligase tags, FlAsH tags, V5 tags, and SBP-tags. Additional suitable sequences will be apparent to those of skill in the art. In some embodiments, the fusion protein comprises one or more His tags.

### Protospacers

[0129] The term “protospacer” or “target sequence” and its grammatical equivalents as used herein can refer to a PAM-adjacent nucleic acid sequence. A protospacer can be a nucleotide sequence within gene, genome, or chromosome that is targeted by a gRNA. In the native state, a protospacer is adjacent to a PAM (protospacer adjacent motif). The site of cleavage by an RNA-guided nuclease is within a protospacer sequence. For example, as illustrated in FIG. 1A, when a gRNA targets a specific protospacer, the Cas protein will generate a double strand break within the protospacer sequence, thereby cleaving the protospacer. Following cleavage, disruption of the protospacer can result though non-homologous end joining or homology-directed repair. Disruption of the protospacer can result in the deletion of the protospacer. Additionally, or alternatively, disruption of the protospacer can result in an exogenous nucleic acid sequence being inserted into or replacing the protospacer.

[0130] With the present disclosure, protospacer sequences were identified within the nucleotide sequence of the human TTR gene to be used as guide sequences that permit ABE8.8 (and other ABE variants containing Streptococcus pyogenes Cas9, such as ABE7.10, or another Cas protein that can use the NGG PAM) to either disrupt the start codon, or disrupt splice sites, whether donors or acceptors, via A→G editing within its editing window (roughly positions 4 to 7 in the 20-nt protospacer region of DNA). Four of the sequences shown in Table 1 were identified within the human TTR gene. The alignment of these four protospacer sequences on a map of the human TTR gene is shown in FIG. 3.

[0131] Protospacer, corresponding to guide RNA GA457, has the sequence 5′-GCCATCCTGCCAAGAATGAG-3′ (SEQ ID NO: 24) and is located at 34,879 to 34,898 bp of the human TTR gene.

[0132] Protospacer, corresponding to guide RNA GA459, has the sequence 5′-GCAACTTACCCAGAGGCAAA-3′ (SEQ ID NO: 25) and is located at 36,007 to 36,026 bp of the human TTR gene.

[0133] Protospacer, corresponding to guide RNA GA460, has the sequence 5′-TATAGGAAAACCAGTGAGTC-3′ (SEQ ID NO: 26) and is located at 38,106-38,125 bp of the human TTR gene.

[0134] Protospacer, corresponding to guide RNA GA461, has the sequence 5′-TACTCACCTCTGCATGCTCA-3′ (SEQ ID NO: 27) and is located at 38,234-38253 of the human TTR gene.

[0135] Protospacer, corresponding to guide RNA GA458, has the sequence 5′-GCCATCCTGCCAAGAACGAG-3′ (SEQ ID NO: 28) represents the sequence within the cynomolgus macaque TTR gene corresponding to the human protospacer sequence corresponding to guide RNA GA459.

[0136] A guide nucleic acid, (e.g., guide RNA) is about 15-100 nucleotides long and comprises a sequence of at least 10 contiguous nucleotides that is complementary to a target protospacer sequence. In some embodiments, the 3′ end of the target sequence is immediately adjacent to a canonical PAM sequence (NGG). In some embodiments, the 3′ end of the target sequence is not immediately adjacent to a canonical PAM sequence (NGG). In some embodiments, the 3′ end of the target sequence is immediately adjacent to an AGC, GAG, TTT, GTG, or CAA sequence.

[0137] In some embodiments, a guide polynucleotide is a DNA. In some embodiments, a guide polynucleotide is an RNA, also referred to herein as a guide RNA or gRNA. In some embodiments, a guide polynucleotide is a modified, artificial polynucleotide.

[0138] In some embodiments, a guide polynucleotide, including but not limited to, a gRNA, may be synthesized. The guide polynucleotide may comprise a spacer sequence configured to hybridize to the complementary sequence of a protospacer sequence as shown in Table 1 under, for example, conditions within a cell. The guide polynucleotide may comprise a spacer sequence that is homologous to a protospacer sequence as shown in Table 1. In some embodiments, the guide polynucleotide comprises a guide RNA comprising a spacer having a sequence homologous to the protospacer set forth in Table 1. In some embodiments, the guide RNA may have a sequence that comprises a guide RNA (gRNA) sequences set forth in Table 1.

[0139] The present disclosure includes a guide polynucleotide having a sequence at least about 75%, at least about 80%, at least about 85%, at least about 90%, or at least about 95% identical to the sequence 5′-GCCAUCCUGCCAAGAAUGAG-3′ (SEQ ID NO: 1) (GA457). The present disclosure includes a guide polynucleotide having the sequence 5′-GCCAUCCUGCCAAGAAUGAG-3′ (SEQ ID NO: 1) (GA457).

[0140] The present disclosure includes a guide polynucleotide having a sequence at least about 75%, at least about 80%, at least about 85%, at least about 90%, or at least about 95% identical to the sequence 5′-GCCAUCCUGCCAAGAACGAG-3′ (SEQ ID NO: 2) (GA458). The present disclosure includes a guide polynucleotide having the sequence 5′-GCCAUCCUGCCAAGAACGAG-3′ (SEQ ID NO: 2) (GA458).

[0141] The present disclosure includes a guide polynucleotide having a sequence at least about 75%, at least about 80%, at least about 85%, at least about 90%, or at least about 95% identical to the sequence 5′-GCAACUUACCCAGAGGCAAA-3′ (SEQ ID NO: 3) (GA459). The present disclosure includes a guide polynucleotide having the sequence 5′-GCAACUUACCCAGAGGCAAA-3′ (SEQ ID NO: 3) (GA459).

[0142] The present disclosure includes a guide polynucleotide having a sequence at least about 75%, at least about 80%, at least about 85%, at least about 90%, or at least about 95% identical to the sequence 5′-UAUAGGAAAACCAGUGAGUC-3′ (SEQ ID NO: 4) (GA4560). The present disclosure includes a guide polynucleotide having the sequence 5′-UAUAGGAAAACCAGUGAGUC-3′ (SEQ ID NO: 4) (GA4560).

[0143] The present disclosure includes a guide polynucleotide having a sequence at least about 75%, at least about 80%, at least about 85%, at least about 90%, or at least about 95% identical to the sequence 5′-UACUCACCUCUGCAUGCUCA-3′ (SEQ ID NO: 5) (Ga4561). The present disclosure includes a guide polynucleotide having the sequence 5′-UACUCACCUCUGCAUGCUCA-3′ (SEQ ID NO: 5) (Ga4561).

[0144] A guide polynucleotide may include at least three regions: a first region at the 5′ end that can be homologous to a target site in a chromosomal sequence (spacer region), a second internal region that can form a stem loop structure, and a third 3′ region that can be single-stranded. The second and third regions are considered a tracr sequence or region of the guide RNA and serves as a binding scaffold for the base editor or CRISPR/Cas protein, while the spacer regions serves to guide the protein to a specific target site. The acronym tracr refers to trans-activating crispr.

[0145] The second region of a gRNA may form a secondary structure. In some embodiments, a secondary structure formed by a gRNA can comprise a stem (or hairpin) and a loop. A length of a loop and a stem can vary. In some embodiments, a loop can range from about 3 to about 10 nucleotides in length. In some embodiments, a stem can range from about 6 to about 20 nucleotides in length. A stem can comprise one or more bulges of 1 to 10 nucleotides or about 10 nucleotides. In some embodiments, the overall length of a second region can range from about 16 to 60 nucleotides in length. In some embodiments, a loop can be about 4 nucleotides in length. In some embodiments, a stem can be about 12 in length.

[0146] The third region of gRNA at the 3′ end can be single-stranded. In some embodiments, a third region is not complementary to any chromosomal sequence in a cell of interest and is not complementary to the rest of a gRNA. The third region may have any suitable length. For example, the third region may be three or more or four or more nucleotides in length. In some embodiments, the length of a third region can vary, ranging from about 5 to about 60 nucleotides in length.

[0147] In some embodiments, the guide polynucleotide includes a spacer sequence that is homologous to a protospacer sequence of the TTR gene as shown in Table 1 with 0, 1, 2, 3, 4, or 5 mismatches. In some embodiments, the guide polynucleotide includes a spacer sequence homologous to a protospacer sequence of the TTR gene as shown in Table 1 with no mismatches.

[0148] In some embodiments, the length of a guide polynucleotide depends on the CRISPR/Cas component of the base editor system and components used. For example, different Cas proteins from different bacterial species have varying optimal targeting sequence lengths. Accordingly, the targeting sequence may comprise 5, 6, 7, 8, 9, 10, 11, 12, 13, 14, 15, 16, 17, 18, 19, 20, 21, 22, 23, 24, 25, 26, 27, 28, 29, 30, 31, 32, 33, 34, 35, 36, 37, 38, 39, 40, 41, 42, 43, 44, 45, 46, 47, 48, 49, 50, or more than 50 nucleotides in length. In some embodiments, the targeting sequence comprises 18-24 nucleotides in length. In some embodiments, the targeting sequence comprises 19-21 nucleotides in length. In some embodiments, such as those described in Table 1, the targeting sequence comprises 20 nucleotides in length.

[0149] In some embodiments, a guide polynucleotide includes a spacer sequences and otherwise conforms to the standard 100-nt Streptococcus pyogenes CRISPR gRNA sequence.

[0150] In some embodiments, the guide RNA is chemically modified. Chemically modified gRNAs may have increased stability when transfected into mammalian cells. For example, gRNAs can be chemically modified to comprise a combination of 2′-O-methylribosugar and phosphorothioate backbone modifications on at least one 5′ nucleotide and at least one 3′ nucleotide of each gRNA. In some cases, the three terminal 5′ nucleotides and three terminal 3′ nucleotides are chemically modified to comprise combinations of 2′-O-methylribosugar and phosphorothioate modifications.

[0151] The gRNAs described herein can be synthesized chemically, enzymatically, or a combination thereof. For example, the gRNA can be synthesized using standard phosphoramidite-based solid-phase synthesis methods. Alternatively, the gRNA can be synthesized in vitro by operably linking DNA encoding the gRNA to a promoter control sequence that is recognized by a phage RNA polymerase. Examples of suitable phage promoter sequences include, but are not limited to, T7, T3, SP6 promoter sequences, or variations thereof. In some embodiments, gRNA comprises two separate molecules (e.g., crRNA (which comprises the spacer) and tracrRNA). One molecule (e.g., crRNA) can be chemically synthesized and the other molecule (e.g., tracrRNA) can be enzymatically synthesized.

### Therapeutic Applications

[0152] The guide polynucleotides and compositions described herein may be administered to target cells or a subject in need thereof, in a therapeutically effective amount, to prevent or treat conditions related to transthyretin amyloidosis. In some embodiments, the subject has hereditary transthyretin amyloidosis (hATTR). In some embodiments, the subject has cardiomyopathy due to transthyretin amyloidosis (ATTR-CM). In some embodiments, the subject has polyneuropathy due to transthyretin amyloidosis (ATTR-PN). In some embodiments, the subject has wild-type ATTR (ATTRwt), the age-related deposition of wild type TTR protein (formerly known as senile amyloidosis).

[0153] With such administration, the guide polynucleotide directs the editor system (e.g., ABE editor system) to affect a nucleobase alteration in a TTR gene in the subject, editing the TTR gene to reduce or abolish the amount of full-length, functional protein being produced, thus treating the conditions. In some embodiments, the base alteration occurs in the cells of the liver (hepatocytes) in the subject.

[0154] For example, the gRNA and an adenosine base editor protein, which may be expressed in a cell wherein target gene editing is desired, such as, for example, a liver cell, thereby allowing contact of the target gene with the gRNA and the adenosine base editor protein. In some embodiments, the binding of the adenosine base editor protein to its target polynucleotide sequence in the target gene is directed by the guide RNA, wherein the spacer sequence of the gRNA hybridizes with a target polynucleotide sequence in a target gene e.g., a complimentary sequence to the protospacer. Thus, the guide RNA directs adenosine base editor protein to edit the target polynucleotide sequence (e.g., the protospacer sequence) in the target gene. In some embodiments, the guide RNA is co-introduced into a cell where editing is desired with the adenosine base editor protein or with a nucleic acid encoding the adenosine base editor protein.

[0155] In certain embodiments, adenine base editors may be used to disrupt gene function and/or expression by modifying nucleobases at splice sites of target genes. In some embodiments, an adenosine nucleobase editor as described herein may be used to disrupt a splice donor site at the 5′ end of an introns or a splice acceptor site at the 3′ ends of an intron. In some embodiments, splice site disruption results in the inclusion of intronic sequences in messenger RNA (mRNA) potentially introducing nonsense, frameshift, or in-frame indel mutations that result in premature stop codons or in insertion/deletion of amino acids that disrupt protein activity—or in the exclusion of exonic sequences, which can also introduce nonsense, frameshift, or in-frame indel mutations.

[0156] Canonical splice donors comprise the DNA sequence GT on the sense strand, whereas canonical splice acceptors comprise the DNA sequence AG. In some embodiments, a base editor, such as an adenosine nucleobase editor as described herein can be used to generate alteration of the sequence disrupts normal splicing. In some embodiments, the adenosine base editor disrupts a complementary A on the antisense strand of the splice donor, causing an edit of GT→GC. In some embodiments, the adenosine base editor disrupts the A of the splice acceptor site on the sense strand, causing an edit of AG→GG.

[0157] In some embodiments, the methods and composition disclosed herein reduce or abolish the expression and/or function of the transthyretin protein encoded by the TTR gene. For example, the methods and composition disclosed herein may reduce expression and/or function of transthyretin by at least 2-fold, at least 3-fold, at least 4-fold, at least 5-fold, at least 6-fold, at least 7-fold, at least 8-fold, at least 9-fold, or at least 10-fold relative to a control.

[0158] In some embodiments, the method for treating or preventing a condition in a subject in need thereof as described herein includes administering (i) a guide polynucleotide and (ii) a nucleic acid encoding a base editor fusion protein to the subject.

[0159] In some embodiments, the method for treating or preventing a condition in a subject in need thereof as described herein includes administering a lipid nanoparticle (LNP) enclosing a (i) guide polynucleotide or a nucleic acid encoding the guide polynucleotide and/or (ii) a base editor fusion protein comprising a programmable DNA binding domain and a deaminase or a nucleic acid encoding the same. In some aspects, the (i) guide polynucleotide or nucleic acid encoding the same and (ii) the base editor fusion protein comprising a programmable DNA binding domain and a deaminase or a nucleic acid encoding the same are enclosed the same LNPs. In some aspects, they are enclosed in separate LNPs.

### Pharmaceutical Compositions

[0160] In some aspects, provided herein is a pharmaceutical composition comprising the base editor system as provided herein and a pharmaceutically acceptable carrier or excipient. In some aspects, provided herein, is a pharmaceutical composition for gene modification comprising a guide RNA as described herein and a base editor fusion protein or a nucleic acid sequence encoding the base editor fusion protein and a pharmaceutically acceptable carrier. Pharmaceutical compositions are formulated in a conventional manner using one or more pharmaceutically acceptable inactive ingredients that facilitate processing of the active compounds into preparations that can be used pharmaceutically. Suitable formulations for use in the present disclosure and methods of delivery are generally well known in the art. Proper formulation is dependent upon the route of administration chosen. A summary of pharmaceutical compositions described herein can be found, for example, in Remington: The Science and Practice of Pharmacy, Nineteenth Ed (Easton, Pa.: Mack Publishing Company, 1995); Hoover, John E., Remington's Pharmaceutical Sciences, Mack Publishing Co., Easton, Pennsylvania 1975; Liberman, H. A. and Lachman, L., Eds., Pharmaceutical Dosage Forms, Marcel Decker, New York, N.Y., 1980; and Pharmaceutical Dosage Forms and Drug Delivery Systems, Seventh Ed. (Lippincott Williams & Wilkins 1999).

[0161] A pharmaceutical composition can be a mixture of a guide RNA as described herein or a nucleic acid sequence encoding the guide RNA and a base editor fusion protein or a nucleic acid sequence encoding the base editor fusion protein with one or more of other chemical components (i.e., pharmaceutically acceptable ingredients), such as carriers, excipients, binders, filling agents, suspending agents, flavoring agents, sweetening agents, disintegrating agents, dispersing agents, surfactants, lubricants, colorants, diluents, solubilizers, moistening agents, plasticizers, stabilizers, penetration enhancers, wetting agents, anti-foaming agents, antioxidants, preservatives, or one or more combination thereof. The pharmaceutical composition facilitates administration to an organism or a subject in need thereof.

[0162] The pharmaceutical compositions of the present disclosure can be administered to a subject using any suitable methods known in the art. The pharmaceutical compositions described herein can be administered to the subject in a variety of ways, including parenterally, intravenously, intradermally, intramuscularly, colonically, rectally, or intraperitoneally. In some embodiments, the pharmaceutical compositions can be administered by intraperitoneal injection, intramuscular injection, subcutaneous injection, or intravenous injection of the subject. In some embodiments, the pharmaceutical compositions can be administered parenterally, intravenously, intramuscularly, or orally.

[0163] In some embodiments, a pharmaceutical composition for gene modification includes a further therapeutic agent. The additional therapeutic agent may modulate different aspects of the disease, disorder, or condition being treated and provide a greater overall benefit than administration of the therapeutic agent alone. Therapeutic agents include, but are not limited to, a chemotherapeutic agent, a radiotherapeutic agent, a hormonal therapeutic agent, and/or an immunotherapeutic agent. In some embodiments, the therapeutic agent may be a radiotherapeutic agent. In some embodiments, the therapeutic agent may be a hormonal therapeutic agent. In some embodiments, the therapeutic agent may be an immunotherapeutic agent. In some embodiments, the therapeutic agent is a chemotherapeutic agent. Preparation and dosing schedules for additional therapeutic agents can be used according to manufacturers' instructions or as determined empirically by a skilled practitioner.

### Lipid Nanoparticle (LNP) Compositions

[0164] The pharmaceutical compositions for gene modification described herein may be encapsulated in lipid nanoparticles (LNP). As used herein, a “lipid nanoparticle (LNP) composition” or a “nanoparticle composition” is a composition comprising one or more described lipids. LNP compositions or formulations, as contemplated herein, are typically sized on the order of micrometers or smaller and may include a lipid bilayer. Nanoparticle compositions encompass lipid nanoparticles (LNPs), liposomes (e.g., lipid vesicles), and lipoplexes. For example, a nanoparticle composition or formulation as contemplated herein may be a liposome having a lipid bilayer with a diameter of 500 nm or less. A LNP as described herein may have a mean diameter of from about 1 nm to about 2500 nm, from about 10 nm to about 1500 nm, from about 20 nm to about 1000 nm, from about 30 nm to about 150 nm, from about 40 nm to about 150 nm, from about 50 nm to about 150 nm, from about 60 nm to about 130 nm, from about 50 nm to 90 nm, from about 55 nm to 85 nm, from about 55 nm to 75 nm, from about 50 nm to about 80 nm, from about 60 nm to about 80 nm, from about 70 nm to about 110 nm, from about 70 nm to about 100 nm, from about 80 nm to about 100 nm, from about 90 nm to about 100 nm, from about 70 to about 90 nm, from about 80 nm to about 90 nm, or from about 70 nm to about 80 nm. The LNPs described herein can have a mean diameter of about 30 nm, 35 nm, 40 nm, 45 nm, 50 nm, 55 nm, 60 nm, 65 nm, 70 nm, 75 nm, 80 nm, 85 nm, 90 nm, 95 nm, 100 nm, 105 nm, 110 nm, 115 nm, 120 nm, 125 nm, 130 nm, 135 nm, 140 nm, 145 nm, 150 nm, or greater. In one embodiment the mean diameter of the LNP is about 70 nm+/−20 nm, 70 nm+/−10 nm, 70 nm+/−5 nm. The LNPs described herein can be substantially non-toxic.

[0165] Lipid nanoparticles (LNPs) employ a non-viral drug delivery mechanism that is capable of passing through blood vessels and reaching hepatocytes [Am. J. Pathol. 2010, 176,14-21]. Apolipoprotein E (ApoE) proteins are capable of binding to the LNPs post PEG-lipid diffusion from the LNP surface with a near neutral charge in the blood stream, and thereby function as an endogenous ligand against hepatocytes, which express the low-density lipoprotein receptor (LDLr) [Mol. Ther., 2010, 18, 1357-1364.]. Control the efficient hepatic delivery of LNP include: 1) effective PEG-lipid shedding from LNP surface in blood serum and 2) ApoE binding to the LNP. Endogenous ApoE-mediated LDLr-dependent LNP delivery route is unavailable or less effective path to achieve LNP-based hepatic gene delivery in patient populations that LDLr deficient.

[0166] Efficient delivery to cells requires specific targeting and substantial protection from the extracellular environment, particularly serum proteins. One method of achieving specific targeting is to conjugate a targeting moiety to an active agents or pharmaceutical effector such as a nucleic acid agent, thereby directing the active agent or pharmaceutical effector to particular cells or tissues depending on the specificity of the targeting moiety. One way a targeting moiety can improve delivery is by receptor mediated endocytotic activity. This mechanism of uptake involves the movement of nucleic acid agent bound to membrane receptors into the interior of an area that is enveloped by the membrane via invagination of the membrane structure or by fusion of the delivery system with the cell membrane. This process is initiated via activation of a cell surface or membrane receptor following binding of a specific ligand to the receptor. Receptor-mediated endocytotic systems include those that recognize sugars such as galactose, mannose, mannose-6-phosphate, peptides and proteins such as transferrin, asialoglycoprotein, vitamin B12, insulin and epidermal growth factor (EGF). Lipophilic moieties, such as cholesterol or fatty acids, when attached to highly hydrophilic molecules such as nucleic acids can substantially enhance plasma protein binding and consequently circulation half-life. Lipophilic conjugates can also be used in combination with the targeting ligands in order to improve the intracellular trafficking of the targeted delivery approach.

[0167] The Asialoglycoprotein receptor (ASGP-R) is a high-capacity receptor, which is abundant on hepatocytes. The ASGP-R shows a 50-fold higher affinity for N-Acetyl-D-Galactosylamine (GalNAc) than D-Gal. LNPs comprising receptor targeting conjugates, may be used to facilitate targeted delivery of the drug substances described herein. The LNPs may include one or more receptor targeting moiety on the surface or periphery of the particle at specified or engineered surface density ranging from relatively low to relatively high surface density. The receptor targeting conjugate may comprise a targeting moiety (or ligand), a linker, and a lipophilic moiety that is connected to the targeting moiety. In some embodiments, the receptor targeting moiety (or ligand) targets a lectin receptor. In some embodiments, the lectin receptor is asialoglycoprotein receptor (ASGPR). In some embodiments the receptor targeting moiety is GalNAc or a derivative GalNAc that targets ASGPR. In one aspect the receptor targeting conjugate comprises of one GalNAc moiety or derivative thereof. In another aspect, the receptor targeting conjugate comprises of two different GalNAc moieties or derivative thereof. In another aspect, the receptor targeting conjugate comprises of three different GalNAc moieties or derivative thereof. In another aspect, the receptor targeting conjugate is lipophilic. In some embodiments, the receptor targeting conjugate comprises one or more GalNAc moieties and one or more lipid moieties, i.e., GalNAc-Lipid. In some embodiments, the receptor targeting conjugate is a GalNAc-Lipid.

[0168] Described herein are (i) LNP compositions comprising an amino lipid, a phospholipid, a PEG lipid, a cholesterol, or a derivative thereof, a payload, or any combination thereof and (ii) LNP compositions comprising an amino lipid, a phospholipid, a PEG-lipid, a cholesterol, a GalNAc-Lipid or a derivative thereof, a payload, or any combination thereof. Each component is described in more detail below.

[0169] In the preparation of LNP compositions comprising the excipients amino lipid, phospholipid, PEG-Lipid and cholesterol, a desired molar ratio of the four excipients is dissolved in a water miscible organic solvent, ethanol for example. The homogenous lipid solution is then rapidly in-line mixed with an aqueous buffer with acidic pH ranging from 4 to 6.5 containing nucleic acid payload to form the lipid nanoparticle (LNP) encapsulating the nucleic acid payload(s). After rapid in-line mixing the LNPs thus formed undergo further downstream processing including concentration and buffer exchange to achieve the final LNP pharmaceutical composition with near neutral pH for administration into cell line or animal diseases model for evaluation, or to administer to human subjects.

[0170] For the preparation of GalNAc-LNP pharmaceutical composition the GalNAc-Lipid is mixed with the four lipid excipients in the water miscible organic solvent prior to the preparation of the GalNAc-LNP. The preparation of the GalNAc-LNP pharmaceutical composition then follow the same steps as described for the LNP pharmaceutical composition. The mol % of the GalNAc-Lipid in the GalNAc-LNP preparation ranges from 0.001 to 2.0 of the total excipients.

[0171] For both LNP and GalNAc-LNP preparation the payload comprises of a guide RNA targeting the TTR gene and an mRNA encoding a base editor protein. In some embodiments, the guide RNA to mRNA ratio in the acidic aqueous buffer and in the final formulation is 6:1, 5:1, 4:1, 3:1, 2.5:1, 2:1, 1.5:1, 1:1, 1:1.5, 1:2, 1:2.5, 1:3, 1:5 or 1:6 by wight. In some embodiment the said mRNA encodes adenosine base editor protein. In some other embodiments the said mRNA encodes cytosine or cytidine base editor protein.

[0172] In some embodiments, an LNP composition may be prepared as described in U.S. patent application Ser. No. 17/192,709, entitled COMPOSITIONS AND METHODS FOR TARGETED RNA DELIVERY, filed on 4 Mar. 2021, claiming the benefit of U.S. Provisional Patent Application Nos. 62/984,866 (filed on 4 Mar. 2020) and 63/078,982 (filed on 16 Sep. 2020), naming Kallanthottathil G. Rajeev as an inventor and Verve Therapeutics, Inc. as the applicant, which application is hereby incorporated herein by reference in its entirety.

### Amino Lipids

### Formula (I)

[0173] In some embodiments, the LNP composition comprises an amino lipid. In one aspect, disclosed herein is an amino lipid having the structure of Formula (I), or a pharmaceutically acceptable salt or solvate thereof,

[chemical structure]

wherein
[0174] each of R¹ and R² is independently C₃-C₂₂ alkyl, C₃-C₂₂ alkenyl, C₃-C₅ cycloalkyl, —C₂-C₁₀ allkylene-L-R⁶, or

[chemical structure]

wherein each of the alkyl, alkylene, alkenyl, and cycloalkyl is independently substituted or unsubstituted;
[0175] each of X, Y, and Z is independently —C(═O)NR⁴—, —NR⁴C(═O)—, —C(═O)O—, —OC(═O)—, —OC(═O)O—, —NR⁴C(═O)O—, —OC(═O)NR⁴—, —NR⁴C(═O)NR⁴—, —NR⁴C(═NR⁴)NR⁴—, —C(═S)NR⁴—, —NR⁴C(═S)—, —C(═O)O—, —OC(═S)—, OC(═S)O—, —NR⁴C(═S)O—, —OC(═S)NR⁴—, —NR⁴C(═S)NR⁴—, —C(═O)S—, —SC(═O)—, —OC(═O)S—, —NR⁴C(═O)S—. —SC(═O)NR⁴—, —C(═S)S—, —SC(═S)—, —SC(═S)O—, —NR⁴C(═S)S—, —SC(═S)NR⁴—, —C(═S)S—, —SC(═S)—, —SC(═O)S—, —SC(═S)S—, —NR⁴C(═S)S—, —SC(═S)NR⁴—O, S, or a bond;
[0176] each of L is independently —C(═O)NR⁴—, —NR⁴C(═O)—, —C(═O)O—. —OC(═O)O—, —NR⁴C(═O)O—, —OC(═O)NR⁴—, —NR⁴C(═O)NR⁴—, —NR⁴C(═NR⁴)NR⁴—, —C(═S)NR⁴—, —NR⁴C(═S)—, —C(═O)O—, —OC(═S)—, OC(═S)O—, —NR⁴C(═S)O—, —OC(═S)NR⁴—, —NR⁴C(═S)NR⁴—, —C(═O)S—, SC(═O)—, —OC(═O)S—, —NR⁴C(═O)S—, —SC(═O)NR⁴—, —C(═S)S—, —SC(═S)—, —SC(═S)O—, —NR⁴C(═S)S—, —SC(═S)NR⁴—, —C(═S)S—, —SC(═S)—, —SC(═O)S—, —SC(═S)S—, —NR⁴C(═S)S—, —SC(═S)NR⁴—, O, S, —C₁-C₁₀ alkylene-O—, —C₁-C₁₀ alkylene-C(═O)O—, —C₁-C₁₀ alkylene-OC(═O)—, or a bond, wherein the alkylene is substituted or unsubstituted;
[0177] R³ is —C₀-C₁₀ alkylene-NR⁷R⁸, —C₀-C₁₀ alkylene-heterocycloalkyl, or —C₀-C₁₀ alkylene-heterocycloaryl, wherein the alkylene, heterocycloalkyl and heterocycloaiyl is independently substituted or unsubstituted; each of R⁴ is independently hydrogen or substituted or unsubstituted C₁-C₆ alkyl;
[0178] R⁵ is hydrogen or substituted or unsubstituted C₁-C₆ alkyl;
[0179] each of R⁶ is independently substituted or unsubstituted C₃-C₂₂ alkyl or substituted or unsubstituted C₃-C₂₂ alkenyl;
[0180] each of R⁷ and R⁸ is independently hydrogen or substituted or unsubstituted C₁-C₆ alkyl, or R⁷ and R⁸ taken together with the nitrogen to which they are attached form a substituted or unsubstituted C₂-C₆ heterocyclyl;
[0181] p is an integer selected from 1 to 10; and
[0182] each of n, m, and q is independently 0, 1, 2, 3, 4, or 5.

[0183] In some embodiments of Formula (I), if the structure carries more than one asymmetric C-atom, each asymmetric C-atom independently represents racemic, chirally pure R and/or chirally pure S isomer, or a combination thereof.

[0184] In some embodiments, each of n, in, and q in Formula (I) is independently 0, 1, 2, or 3. In some embodiments, each of n, m, and q in Formula (I) is 1.

### Formula (Ia)

[0185] In some embodiments, the compound of Formula (I) has a structure of Formula (Ia), or a pharmaceutically acceptable salt or pharmaceutically acceptable solvate thereof:

[chemical structure]

wherein
[0186] each of R¹ and R² is independently C₃-C₂₂ alkyl, C₃-C₂₂ alkenyl, C₃-C₅ cycloalkyl, —C₂-C₁₀ alkylene-L-R⁶, or

[chemical structure]

wherein each of the alkyl, alkylene, alkenyl, and cycloalkyl is independently substituted or unsubstituted;
[0187] each of X, Y, and Z is independently C(═O)NR⁴—, —NR⁴C(D)-, —C(═O)O—, —OC(═O)—, —OC(═O)O—, —NR⁴C(═O)O—, —OC(═O)NR⁴—, —NR⁴C═O)NR⁴—, —NR⁴C(═NR⁴)NR⁴—. —C(═S)NR⁴—, —NR⁴C(═S)—, —C(E)O—, —OC(═S)—, OC(═S)O—, —NR⁴C(═S)O—, —OC(═S)NR⁴—, —NR⁴C(═S)NR⁴—, —C(═O)S—, —SC(═O)—, —OC(═O)S—, —NR⁴C(═O)S—, —SC(═O)NR⁴—, —C(═S)S—, —SC(═S)—, —SC(═S)O—, —NR⁴C(═S)S—, —SC(═S)NR⁴—, —C(═S)S—. —SC(═S)—, —SC(═O)S—, —SC(═S)S—. —NR⁴C(═S)S—, —SC(═S)NR⁴—, O, S, —C₁-C₁₀ alkylene-O—, or a bond, wherein the alkylene is substituted or unsubstituted;
[0188] each of L is independently —C(═O)NR⁴—, —NR⁴C(═O)—, —C(═O)O—, —OC(═O)—, —OC(═O)O—, —NR⁴C(═O)O—, —OC(═O)NR⁴—, —NR⁴C(═O)NR⁴—, —NR⁴C(═NR⁴)NR⁴—. —C(═S)NR⁴—, —NR⁴C(═S)—, —C(═O)O—, —OC(═S)—, OC(═S)O—, —NR⁴C(═S)O—, —OC(═S)NR⁴—, —NR⁴C(═S)NR⁴—, —C(═O)S—, —SC(═O)—, —OC(═O)S—, —NR⁴C(═O)S—, —SC(═O)NR⁴—, —C(═S)S—, —SC(═S)—, —SC(═S)O—, —NR⁴C(═S)S—, —SC(═S)NR⁴—, —C(═S)S—, —SC(═S)—, —SC(═O)S—, —SC(═S)S—, —NR⁴C(═S)S—, —SC(═S)NR⁴—, O, S. —C₁-C₁₀ alkylene-O—, —C₁-C₁₀ alkylene-C(═O)O—, —C₁-C₁₀ alkylene-OC(═O)—, or a bond, wherein the alkylene is substituted or unsubstituted;
[0189] R³ is —C₀-C₁₀ alkylene-NR⁷R⁸, —C₀-C₁₀ alkylene-heterocycloalkyl, or —C₀-C₁₀ alkylene-heterocyclowyl, wherein the alkylene, heterocycloalkyl and heterocycloaryl is independently substituted or unsubstituted;
[0190] each of R⁴ is independently hydrogen or substituted or unsubstituted C₁-C₆ alkyl; R⁵ is hydrogen or substituted or unsubstituted C₁-C₆ alkyl;
[0191] each of R⁶ is independently substituted or unsubstituted C₃-C₂₂ alkyl or substituted or unsubstituted C₃-C₂₂ alkenyl;
[0192] each of R⁷ and R⁸ is independently hydrogen or substituted or unsubstituted C₁-C₆ alkyl, or R⁷ and R⁸ taken together with the nitrogen to which they are attached form a substituted or unsubstituted C₂-C₆ heterocyclyl; and
[0193] p is an integer selected from 1 to 10.

[0194] In some embodiments of Formula (Ia), if the structure carries more than one asymmetric C-atom, each asymmetric C-atom independently represents racemic, chirally pure R and/or chirally pure S isomer, or a combination thereof.

### Variations of Formula (I) and (Ia)

[0195] In some embodiments, R¹ and R² in Formula (I) and Formula (Ia) is independently C₃-C₂₂ alkyl, C₃-C₂₂ alkenyl, —C₂-C₁₀ alkylene-L-R⁶, or

[chemical structure]

wherein each of the alkyl, alkylene, alkenyl, and cycloalkyl is independently substituted or unsubstituted. In some embodiments, R¹ and R² in Formula (I) and Formula (Ia) is independently C₁₀-C₂₀ alkyl, C₁₀-C₂₀ alkenyl. —C₈-C₇ alkylene-L-R⁶, or

[chemical structure]

wherein each of the alkyl, alkylene, alkenyl, and cycloalkyl is independently substituted or unsubstituted. In some embodiments, R¹ in Formula (I) and Formula (Ia) is

[chemical structure]

[0196] In some embodiments, each of L in Formula (I) and Formula (Ia) is independently O, S, —C₁-C₁₀ alkylene-O—, —C₁-C₁₀ alkylene-C(═O)O—, —C₁-C₁₀ alkylene-OC(═O)—, or a bond, wherein the alkylene is substituted or unsubstituted. In some embodiments, each of L in Formula (I) and Formula (Ia) is independently O, S, —C₁-C₃ alkylene-O—, —C₁-C₃ alkylene-C(═O)O—, —C₁-C₃ alkylene-OC(═O)—, or a bond, wherein the alkylene is substituted or unsubstituted. In some embodiments, each of L in Formula (I) and Formula (Ia) is independently O, S, —C₁-C₃ alkylene-O—, —C₁-C₃ alkylene-C(═O)O—, —C₁-C₃ alkylene-OC(═O)—, or a bond, wherein the alkylene is linear or branched unsubstituted alkylene.

[0197] In some embodiments, each of R⁶ in Formula (I) and Formula (Ia) is independently substituted or unsubstituted linear C₃-C₂₂ alkyl or substituted or unsubstituted linear C₃-C₂₂ alkenyl. In some embodiments, each of R⁶ in Formula (I) and Formula (Ia) is independently substituted or unsubstituted C₃-C₂₀ alkyl or substituted or unsubstituted C₃-C₂₀ alkenyl. In some embodiments, each of R⁶ in Formula (I) and Formula (Ia) is independently substituted or unsubstituted C₃-C₁₀ alkyl or substituted or unsubstituted C₃-C₁₀ alkenyl. In some embodiments, each of R⁶ in Formula (I) and Formula (Ia) is independently substituted or unsubstituted C₃-C₁₀ alkyl. In some embodiments, each of R⁶ in Formula (I) and Formula (Ia) is independently substituted or unsubstituted linear C₃-C₁₀ alkyl. In some embodiments, each of R⁶ in Formula (I) and Formula (Ia) is independently substituted or unsubstituted n-pentyl, n-hexyl, n-heptyl, n-octyl, n-nonyl, n-decyl, n-undecyl, or n-dodecyl. In some embodiments, each of R⁶ in Formula (I) and Formula (Ia) is independently substituted or unsubstituted n-octyl. In some embodiments, each of R⁶ in Formula (I) and Formula (Ia) is n-octyl.

[0198] In some embodiments, each of L in Formula (I) and Formula (Ia) is independently —C(═O)O—, —OC(═O)—, —C₁-C₁₀ alkylene-O—, or O. In some embodiments, each of L in Formula (I) and Formula (Ia) is O. In some embodiments, each of L in Formula (I) and Formula (Ia) is —C₁-C₃ alkylene-O—. In some embodiments, p in Formula (I) and Formula (Ia) is 1, 2, 3, 4, or 5. In some embodiments, p in Formula (I) and Formula (Ia) is 2.

[0199] In some embodiments, R¹ in Formula (I) and Formula (Ia) is

[chemical structure]

[chemical structure]

[0200] In some embodiments R¹ in Formula (I) and Formula (Ia) is R².

[0201] In some embodiments, each of R⁴ in Formula (I) and Formula (Ia) is independently H or substituted or unsubstituted C₁-C₄ alkyl. In some embodiments, each of R⁴ in Formula (I) and Formula (Ia) is independently substituted or unsubstituted linear C₁-C₄ alkyl. In some embodiments, each of R⁴ in Formula (1) and Formula (Ia) is H. In some embodiments, each of R⁴ in Formula (I) and Formula (Ia) is independently H, —CH₃, —CH₂CH₃, —CH₂CH₂CH₃, or —CH(CH₃)₂. In some embodiments, each of R⁴ in Formula (I) and Formula (Ia) is independently H or —CH₃. In some embodiments, each of R⁴ in Formula (I) and Formula (Ia) is —CH₃.

[0202] In some embodiments, X in Formula (I) and Formula (Ia) is —C(═O)O— or —OC(═O))—. In some embodiments, X in Formula (I) and Formula (Ia) is —C(═O)NR⁴— or —NR⁴C(═O)—. In some embodiments, X in Formula (I) and Formula (Ia) is —C(═O)N(CH₃)—, —N(CH₃)C(═O)—, —C(═O)NH—, or —NHC(═O)—. In some embodiments, X in Formula (I) and Formula (Ia) is —C(═O))NH—, —C(═O)N(CH₃)—. —OC(═O))—, —NHC(═O)—, —N(CH₃)C(═O))—, —C(═O)O—, —OC(═O)O—, —NHC(═O)O—, —N(CH₃)C(═O)O—, —OC(═O))NH—, —OC(═O)N(CH₃)—, —NHC(═O)NH—, —N(CH₃)C(═O))NH—, —NHC(═O)N(CH₃)—, —N(CH₃)C(═O)N(CH₃)—, NHC(═NH)NH—, —N(CH₃)C(═NH)NH—, —NHC(═NH)N(CH₃)—, —N(CH₃)C(═NH)N(CH₃)—, NHC(═NMe)NH—, —N(CH₃)C(═NMe)NH—, —NHC(═NMe)N(CH₃)—, or —N(CH₃)C(═NMe)N(CH₃)—.

[0203] In some embodiments. R² in Formula (I) and Formula (Ia) is C₃-C₂₂ alkyl, C₃-C₂₂ alkenyl, —C₂-C₁₀ alkylene-L-R⁶, or

[chemical structure]

wherein each of the alkyl, alkylene, alkenyl, and cycloalkyl is independently substituted or unsubstituted. In some embodiments, R² in Formula (I) and Formula (Ia) is substituted or unsubstituted C₇-C₂₂ alkyl or substituted or unsubstituted C₃-C₂₂ alkenyl. In some embodiments, R² in Formula (I) and Formula (Ia) is substituted or unsubstituted linear C₇-C₂₂ alkyl or substituted or unsubstituted linear C₃-C₂₂ alkenyl. In some embodiments, R² in Formula (I) and Formula (Ia) is substituted or unsubstituted C₁₀-C₂₀ alkyl or substituted or unsubstituted C₁₀-C₂₀ alkenyl. In some embodiments, R² in Formula (I) and Formula (Ia) is unsubstituted C₁₀-C₂₀ alkyl. In some embodiments, R² in Formula (I) and Formula (Ia) is unsubstituted C₁₀-C₂₀ alkenyl. In some embodiments, R² in Formula (I) and Formula (Ia) is —C₂-C₁₀ alkylene-L-R⁶. In some embodiments, R² in Formula (I) and Formula (Ia) is —C₂-C₁₀ alkylene-C(═O)O—R⁶ or —C₂-C₁₀ alkylene-OC(═O)—R⁶.

[0204] In some embodiments, R² in Formula (I) and Formula (Ia) is

[chemical structure]

[0205] In some embodiments, Y in Formula (I) and Formula (Ia) is —C(═O)O— or —OC(═O)—. In some embodiments, Y in Formula (I) and Formula (Ia) is —C(═O)NR⁴— or —NR⁴C(═O)—. In some embodiments, Y in Formula (I) and Formula (Ia) is —C(═O)N(CH₃)—, —N(CH₃)C(═O)—, —C(═O)NH—, or —NHC(═O)—. In some embodiments, Y in Formula (I) and Formula (Ia) is —OC(═O)O—, —NR⁴C(═O)O—, —OC(═O)NR⁴—, or —NR⁴C(═O)NR⁴—. In some embodiments, Y in Formula (I) and Formula (Ia) is —OC(═O)O—, —NHC(═O)O—, —OC(═O)NH—, —NHC(═O)NH—, —N(CH₃)C(═O)O—. —OC(═O)N(CH₃)—, —N(CH₃)C(═O)N(CH₃)— or —N(CH₃)C(═O)NH—. In some embodiments, Y in Formula (I) and Formula (Ia) is —OC(═O)O—, —NHC(═O)O—, —OC(═O)NH—, or —NHC(═O)NH—.

[0206] In some embodiments, R³ in Formula (I) and Formula (Ia) is —C₀-C₁₀ alkylene-NR⁷R⁸ or —C₀-C₁₀ alkylene-heterocycloalkyl, wherein the alkylene and heterocycloalkyl is independently substituted or unsubstituted. In some embodiments, R³ in Formula (I) and Formula (Ia) is —C₀-C₁₀ alkylene-NR⁷R⁸. In some embodiments, R³ in Formula (I) and Formula (Ia) is —C₁-C₆ alkylene-NR⁷R⁸. In some embodiments, R³ in Formula (I) and Formula (Ia) is —C₁-C₄ alkylene-NR⁷R⁸. In some embodiments, R³ in Formula (I) and Formula (Ia) is —C1-alkylene-NR⁷R⁸. In some embodiments, R³ in Formula (I) and Formula (Ia) is —C₂-alkylene-NR⁷R⁸. In some embodiments, R³ in Formula (I) and Formula (Ia) is —C₃-alkylene-NR⁷R⁸. In some embodiments, R³ in Formula (I) and Formula (Ia) is —C₄-alkylene-NR⁷R⁸. In some embodiments, R³ in Formula (I) and Formula (Ia) is —C₅-alkylene-NR⁷R⁸. In some embodiments, R³ in Formula (I) and Formula (Ia) is —C₀-C₁₀ alkylene-heterocycloalkyl. In some embodiments, R³ in Formula (I) and Formula (Ia) is —C₁-C₆ alkylene-heterocycloalkyl, wherein the heterocycloalkyl comprises 1 to 3 nitrogen and 0-2 oxygen. In some embodiments, R³ in Formula (I) and Formula (Ia) is —C₁-C₆ alkylene-heterocycloaryl.

[0207] In some embodiments, each of R⁷ and R⁸ in Formula (I) and Formula (Ia) is independently hydrogen or substituted or unsubstituted C₁-C₆ alkyl. In some embodiments, each of R⁷ and R⁸ is independently hydrogen or substituted or unsubstituted C₁-C₃ alkyl. In some embodiments, each of R⁷ and R⁸ is independently substituted or unsubstituted C₁-C₃ alkyl. In some embodiments, each of R⁷ and R⁸ is independently —CH₃, —CH₂CH₃, —CH₂CH₂CH₃, or —CH(CH₃)₂. In some embodiments, each of R and R⁸ is CH₃. In some embodiments, each of R⁷ and R⁸ is —CH₂CH₃.

[0208] In some embodiments, R⁷ and R⁸ in Formula (I) and Formula (Ia) taken together with the nitrogen to which they are attached form a substituted or unsubstituted C₂-C₆ heterocyclyl. In some embodiments, R⁷ and R⁸ taken together with the nitrogen to which they are attached form a substituted or unsubstituted C₂-C₆ heterocycloalkyl. In some embodiments, R⁷ and R⁸ taken together with the nitrogen to which they are attached form a substituted or unsubstituted 3-7 membered heterocycloalkyl.

[0209] In some embodiments, R³ in Formula (I) and Formula (Ia) is

[chemical structure]

[0210] In some embodiments. R³ in Formula (I) and Formula (Ia) is

[chemical structure]

[0211] In some embodiments. R³ in Formula (1) and Formula (Ia) is

[chemical structure]

[0212] In some embodiments, Z in Formula (I) and Formula (Ia) is —C(═O)O— or —OC(═O)—.

[0213] In some embodiments, Z in Formula (I) and Formula (Ia) is —C(═O)NR⁴— or —NR⁴C(═O)—.

[0214] In some embodiments, Z in Formula (I) and Formula (Ia) is —C(═O)N(CH₃)—, —N(CH₃)C(═O)—, —C(═O)NH—, or —NHC(═O)—.

[0215] In some embodiments, Z in Formula (I) and Formula (Ia) is —OC(═O)O—, —NR⁴C(═O)O—, —OC(O)NR⁴—, or —NR⁴C(═O)NR⁴—.

[0216] In some embodiments, Z in Formula (I) and Formula (Ia) is —OC(═O)O—, —NHC(═O)O—, —OC(═O)NH—, —NHC(═O)NH—, —N(CH₃)C(═O)O—, —OC(═O)N(CH₃)—, —N(CH₃)C(═O)N(CH₃)—, —NHC(═O)N(CH₃)— or —N(CH₃)C(═O)NH—.

[0217] In some embodiments, Y in Formula (I) and Formula (Ia) is —OC(═O)O—, —NHC(═O)O—, —OC(═O)NH—, or —NHC(═O)NH—.

[0218] In some embodiments, R⁵ in Formula (I) and Formula (Ia) is hydrogen or substituted or unsubstituted C₁-C₃ alkyl.

[0219] In some embodiments, R⁵ in Formula (I) and Formula (Ia) is H, —CH₃, —CH—)CH₃, —CH₂CH₂CH₃, or —CH(CH₃)₂.

[0220] In some embodiments, R⁵ in Formula (I) and Formula (Ia) is H.

### LNP Compositions Comprising Different Amino Lipids

[0221] In some embodiments, the LNP comprises a plurality of amino lipids having different formulas. For example, the LNP composition can comprise 2, 3, 4, 5, 6.7, 8, 9. 10, or more amino lipids. For another example, the LNP composition can comprise at least 2, at least 3, at least 4, at least 5, at least 6, at least 7, at least 9, at least 10, or at least 20 amino lipids. For yet another example, the LNP composition can comprise at most 2, at most 3, at most 4, at most 5, at most 6, at most 7, at most 9, at most 10, at most 20, or at most 30 amino lipids.

[0222] In some embodiments, the LNP composition comprises a first amino lipid. In some embodiments, the LNP composition comprises a first amino lipid and a second amino lipid. In some embodiments, the LNP composition comprises a first amino lipid, a second amino lipid, and a third amino lipid. In some embodiments, the LNP composition comprises a first amino lipid, a second amino lipid, a third amino lipid, and a fourth amino lipid. In some embodiments, the LNP composition does not comprise a fourth amino lipid. In some embodiments, the LNP composition does not comprise a third amino lipid. In some embodiments, a molar ratio of the first amino lipid to the second amino lipid is from about 0.1 to about 10. In some embodiments, a molar ratio of the first amino lipid to the second amino lipid is from about 0.20 to about 5. In some embodiments, a molar ratio of the first amino lipid to the second amino lipid is from about 0.25 to about 4. In some embodiments, a molar ratio of the first amino lipid to the second amino lipid is about 0.25, about 0.33, about 0.5, about 1, about 2, about 3, or about 4.

[0223] In some embodiments, a molar ratio of the first amino lipid:the second amino lipid:the third amino lipid is about 4:1:1. In some embodiments, a molar ratio of the first amino lipid:the second amino lipid:the third amino lipid is about 1:1:1. In some embodiments, a molar ratio of the first amino lipid:the second amino lipid:the third amino lipid is about 2:1:1. In some embodiments, a molar ratio of the first amino lipid:the second amino lipid:the third amino lipid is about 2:2:1. In some embodiments, a molar ratio of the first amino lipid:the second amino lipid:the third amino lipid is about 3:2:1. In some embodiments, a molar ratio of the first amino lipid:the second amino lipid:the third amino lipid is about 3:1:1. In some embodiments, a molar ratio of the first amino lipid:the second amino lipid:the third amino lipid is about 5:1:1. In some embodiments, a molar ratio of the first amino lipid:the second amino lipid:the third amino lipid is about 3:3:1. In some embodiments, a molar ratio of the first amino lipid:the second amino lipid: the third amino lipid is about 4:4:1.

### Additional Amino Lipid Embodiments

[0224] In some embodiments, the LNP composition comprises one or more amino lipids. In some embodiments, the one or more amino lipids comprise from about 40 mol % to about 65 mol % of the total lipid present in the particle. In some embodiments, the one or more amino lipids comprise about 40 mol %, about 41 mol %, about 42 mol %, about 43 mol %, about 44 mol %, about 45 mol %, about 46 mol %, about 47 mol %, about 48 mol %, about 49 mol %, about 50 mol %, about 51 mol %, about 52 mol %, about 53 mol %, about 54 mol %, about 55 mol %, about 56 mol %, about 57 mol %, about 58 mol %, about 59 mol %, about 60 mol %, about 61 mol %, about 62 mol %, about 63 mol %, about 64 mol %, or about 65 mol % of the total lipid present in the particle. In some embodiments, the first amino lipid comprises from about 1 mol % to about 99 mol % of the total amino lipids present in the particle. In some embodiments, the first amino lipid comprises from about 16.7 mol % to about 66.7 mol % of the total amino lipids present in the particle. In some embodiments, the first amino lipid comprises from about 20 mol % to about 60 mol % of the total amino lipids present in the particle.

[0225] In some embodiments, the amino lipid is an ionizable lipid. An ionizable lipid can comprise one or more ionizable nitrogen atoms. In some embodiments, at least one of the one or more ionizable nitrogen atoms is positively charged. In some embodiments, at least 10 mol %, 20 mol %, 30 mol %, 40 mol %, 50 mol %, 60 mol %, 70 mol %, 80 mol %. 90 mol %, 95 mol %, or 99 mol % of the ionizable nitrogen atoms in the LNP composition are positively charged. In some embodiments, the amino lipid comprises a primary amine, a secondary amine, a tertiary amine, an imine, an amide, a guanidine moiety, a histidine residue, a lysine residue, an arginine residue, or any combination thereof. In some embodiments, the amino lipid comprises a primary amine, a secondary amine, a tertiary amine, a guanidine moiety, or any combination thereof. In some embodiments, the amino lipid comprises a tertiary amine.

[0226] In some embodiments, the amino lipid is a cationic lipid. In some embodiments, the amino lipid is an ionizable lipid. In some embodiments, the amino lipid comprises one or more nitrogen atoms. In some embodiments, the amino lipid comprises one or more ionizable nitrogen atoms. Exemplary cationic and/or ionizable lipids include, but are not limited to, 3-(didodecylamino)-N1,N1,4-tri dodecyl-1-piperazineethan amine (KL10), N142-(didodecylamino)ethy1]-N1,N4,N4-tridodecyl-1,4-piperazinediethanamine (KL22), 14,25-ditridecyl-15,18,21,24-tetraaza-octatriacontane (KL25), 1,2-dilinoleyloxy-N,N-dimethylaminopropane (DLin-DMA), 2,2-dilinoleyl-4-dimethylaminomethyl-[1,3]-dioxolane (DLin-K-DMA), heptatriaconta-6,9,28,31-tetraen-19-yl 4-(dimethylamino)butanoate (DLin-MC 3-DMA), 2,2-dilinoleyl-4-(2-dimethylaminoethyl)-[1,3]-dioxolane (DLin-KC2-DMA), 1,2-dioleyloxy-N,N-dimethylaminopropane (DODMA), 2-({8-[(3β)-cholest-5-en-3-yloxy]octyl}oxy)-N,N-dimethyl-3-[(9Z,12Z)-octadeca-9,12-dien-1-yloxy]propan-1-amine (Octyl-CLinDMA), (2R)-2-({8-[(3β)-cholest-5-en-3-yloxy]octyl}oxy)-N,N-dimethy1-3-[(9Z,12Z)-octadeca-9,12-dien-1-yloxy]propan-1-amine (Octyl-CLinDMA (2R)), and (2S)-2-({8-[(3β)-cholest-5-en-3-yloxy]octyl}oxy)-N,N-dimethyl-3-[(9Z,12Z)-octadeca-9,12-dien-1-yloxy]propan-1-amine (Octyl-CLinDMA (2S)).

[0227] In some embodiments, an amino lipid described herein can take the form of a salt, such as a pharmaceutically acceptable salt. All pharmaceutically acceptable salts of the amino lipid are encompassed by this disclosure. As used herein, the term “amino lipid” also includes its pharmaceutically acceptable salts, and its diastereomeric, enantiomeric, and epimeric forms.

[0228] In some embodiments, an amino lipid described herein, possesses one or more stereocenters and each stereocenter exists independently in either the R or S configuration. The lipids presented herein include all diastereomeric, enantiomeric, and epimeric forms as well as the appropriate mixtures thereof. The lipids provided herein include all cis. trans, syn, anti, entgegen (E), and zusammen (Z) isomers as well as the appropriate mixtures thereof. In certain embodiments, lipids described herein are prepared as their individual stereoisomers by reacting a racemic mixture of the compound with an optically active resolving agent to form a pair of diastereoisomeric compounds/salts, separating the diastereomers and recovering the optically pure enantiomers. In some embodiments, resolution of enantiomers is carried out using covalent diastereomeric derivatives of the compounds described herein. In another embodiment, diastereomers are separated by separation/resolution techniques based upon differences in solubility. In other embodiments, separation of stereoisomers is performed by chromatography or by the forming diastereomeric salts and separation by recrystallization, or chromatography, or any combination thereof. Jean Jacques, Andre Collet, Samuel H. Wilen, “Enantiomers, Racemates and Resolutions”, John Wiley and Sons, Inc., 1981. In one aspect, stereoisomers are obtained by stereoselective synthesis.

[0229] In some embodiments, the lipids such as the amino lipids are substituted based on the structures disclosed herein. In some embodiments, the lipids such as the amino lipids are unsubstituted. In another embodiment, the lipids described herein are labeled isotopically (e.g., with a radioisotope) or by another other means, including, but not limited to, the use of chromophores or fluorescent moieties, bioluminescent labels, or chemiluminescent labels.

[0230] Lipids described herein include isotopically-labeled compounds, which are identical to those recited in the various formulae and structures presented herein, but for the fact that one or more atoms are replaced by an atom having an atomic mass or mass number different from the atomic mass or mass number usually found in nature. Examples of isotopes that can be incorporated into the present lipids include isotopes of hydrogen, carbon, nitrogen, oxygen, sulfur, fluorine, and chlorine, such as, for example, ²H, ³H, ¹³C, ¹⁴C, ¹⁵N, ¹⁸O, ¹⁷O, ³⁵S, ¹⁸F, ³⁶Cl. In one aspect, isotopically-labeled lipids described herein, for example those into which radioactive isotopes such as ³H and ¹⁴C are incorporated, are useful in drug and/or substrate tissue distribution assays. In one aspect, substitution with isotopes such as deuterium affords certain therapeutic advantages resulting from greater metabolic stability, such as, for example, increased in vivo half-life or reduced dosage requirements.

[0231] In some embodiments, the asymmetric carbon atom of the amino lipid is present in enantiomerically enriched form. In certain embodiments, the asymmetric carbon atom of the amino lipid has at least 50% enantiomeric excess, at least 60% enantiomeric excess, at least 70% enantiomeric excess, at least 80% enantiomeric excess, at least 90% enantiomeric excess, at least 95% enantiomeric excess, or at least 99% enantiomeric excess in the (S)— or (R)-configuration.

[0232] In some embodiments, the disclosed amino lipids can be converted to N-oxides. In some embodiments, N-oxides are formed by a treatment with an oxidizing agent (e.g., 3-chloroperoxybenzoic acid and/or hydrogen peroxides). Accordingly, disclosed herein are N-oxide compounds of the described amino lipids, when allowed by valency and structure, which can be designated as NO or N—O. In some embodiments, the nitrogen in the compounds of the disclosure can be converted to N-hydroxy or N-alkoxy. For example, N-hydroxy compounds can be prepared by oxidation of the parent amine by an oxidizing agent such as ra-CPBA. All shown nitrogen-containing compounds are also considered. Accordingly, also disclosed herein are N-hydroxy and N-alkoxy (e.g., N—OR, wherein R is substituted or unsubstituted C₁-C₆ alkyl, C₁-C₆ alkenyl, C₁-C₆ alkynyl, 3-14-membered carbocycle or 3-14-membered heterocycle) derivatives of the described amino lipids.

[0233] In some embodiments, the one or more amino lipids comprise from about 40 mol % to about 65 mol % of the total lipid present in the particle.

### PEG-Lipids

[0234] In some embodiments, the described LNP composition includes one or more PEG-lipids. As used herein, a “PEG lipid” or “PEG-lipid” refers to a lipid comprising a polyethylene glycol component. Examples of suitable PEG-lipids also include, but are not limited to, PEG-modified phosphatidylethanolamines, PEG-modified phosphatidic acids, PEG-modified ceramides, PEG-modified dialkylamines, PEG-modified diacylglycerols, PEG-modified dialkylglycerols, and mixtures thereof. For example, the one or more PEG-lipids can comprise PEG-c-DOMG, PEG-DMG, PEG-DLPE, PEG-DMPE, PEG-DPPC, a PEG-DSPE lipid, or a combination thereof.

[0235] In some embodiments, PEG-lipid comprises from about 0.1 mol % to about 10 mol % of the total lipid present in the particle.

### Phospholipid

[0236] In some embodiments, the described LNP composition includes one or more phospholipids.

[0237] In some embodiments, the phospholipid comprises from about 5 mol % to about 15 mol % of the total lipid present in the particle.

### Cholesterol

[0238] In some embodiments, the LNP composition includes a cholesterol or a derivative thereof.

### GalNAc-Lipid

[0239] In some embodiments, the LNP composition includes a receptor targeting conjugate comprising a compound formula (V),

[chemical structure]

[0240] wherein,
[0241] a plurality of the A groups collectively comprise a receptor targeting ligand; each L¹, L², L³, L⁴, L⁵, L⁶, L⁷, L⁸, L⁹, L¹⁰ and L¹² is independently substituted or unsubstituted C₁-C₁₂ alkylene, substituted or unsubstituted C₁-C₁₂ heteroalkylene, substituted or unsubstituted C₂-C₁₂ alkenylene, substituted or unsubstituted C₂-C₁₂ alkynylene, —(CH₂CH₂O)ₘ—, —(OCH₂CH₂)ₘ—, —O—, —S—, —S(═O)—, —S(═O)₂—, —S(═O)(═NR¹)—, —C(═O)—, —C(═N—OR¹)—, —C(═O)O—, —OC(═O)—, —C(═O)C(═O)—, —C(═O)NR¹—, —NR¹C(═O)—, —OC(═O)NR¹—, —NR¹C(═O)O—, —NR¹C(═O)NR¹—, —C(═O)NR¹C(═O)—, —S(═O)₂NR¹—, —NR¹S(═O)₂—, —NR¹—, or —N(OR¹)—;
[0242] L¹¹ is substituted or unsubstituted —(CH₂CH₂O)ₙ—, substituted or unsubstituted —(OCH₂CH₂)ₙ— or substituted or unsubstituted —(CH₂)ₙ—;
[0243] each R¹ is independently H or substituted or unsubstituted C₁-C₆alkyl;
[0244] R is a lipid, nucleic acid, amino acid, protein, or lipid nanoparticle;
[0245] m is an integer selected from 1 to 10; and
[0246] n is an integer selected from 1 to 200.

[0247] In some embodiments, each L¹, L⁴, and L⁷ is independently substituted or unsubstituted C₁-C₁₂ alkylene. In some embodiments, each L¹, L⁴, and L⁷ is independently substituted or unsubstituted C₂-C₆ alkylene. In some embodiments, each L¹, L⁴, and L⁷ is C₄ alkylene. In some embodiments, each L², L⁵, and L⁸ is independently —C(═O)NR¹—, —NR¹C(═O)—, —OC(═O)NR¹—, —NR¹C(═O)O—, —NR¹C(═O)NR¹—, or —C(═O)NR¹C(═O)—. In some embodiments, each L², L⁵, and L⁸ is independently —C(═O)NR¹— or —NR¹C(═O)—. In some embodiments, each L², L⁵, and L⁸ is —C(═O)NH—. In some embodiments, each L³, L⁶, and L⁹ is independently substituted or unsubstituted C₁-C₁₂ alkylene. In some embodiments, each L³ is substituted or unsubstituted C₂-C₆ alkylene. In some embodiments, L³ is C₄ alkylene. In some embodiments, each L⁶ and L⁹ is independently substituted or unsubstituted C₂-C₁₀ alkylene. In some embodiments, each L⁶ and L⁹ is independently substituted or unsubstituted C₂-C₆ alkylene. In some embodiments, each L⁶ and L⁹ is C₃ alkylene. In some embodiments, A binds to a lectin. In some embodiments, the lectin is an asialoglycoprotein receptor (ASGPR). In some embodiments, A is N-acetylgalactosamine (GalNAc) or

[chemical structure]

or a derivative thereof. A is N-acetylgalactosamine (GalNAc)

[chemical structure]

or a derivative thereof.

[0248] In some embodiments, the receptor targeting conjugate comprises from about 0.001 mol % to about 20 mol % of the total lipid content present in the nanoparticle composition.

### Phosphate Charge Neutralizer

[0249] In some embodiments, the LNP described herein includes a phosphate charge neutralizer. In some embodiments, the phosphate charge neutralizer comprises arginine, asparagine, glutamine, lysine, histidine, cationic dendrimers, polyamines, or a combination thereof. In some embodiments, the phosphate charge neutralizer comprises one or more nitrogen atoms. In some embodiments, the phosphate charge neutralizer comprises a polyamine.

[0250] Suitable phosphate charge neutralizers to be used in LNP formulations, set forth below, for example include, but are not limited to, Spermidine and 1,3-propanediamine.

### Antioxidants

[0251] In some embodiments, the LNP described herein includes one or more antioxidants. In some embodiments, the one or more antioxidants function to reduce a degradation of the cationic lipids, the payload, or both. In some embodiments, the one or more antioxidants comprise a hydrophilic antioxidant. In some embodiments, the one or more antioxidants is a chelating agent such as ethylenediaminetetraacetic acid (EDTA) and citrate. In some embodiments, the one or more antioxidants comprise a lipophilic antioxidant. In some embodiments, the lipophilic antioxidant comprises a vitamin E isomer or a polyphenol. In some embodiments, the one or more antioxidants are present in the LNP composition at a concentration of at least 1 mM, at least 10 mM, at least 20 mM, at least 50 mM, or at least 100 mM. In some embodiments, the one or more antioxidants are present in the particle at a concentration of about 20 mM.

### Other Lipids

[0252] In some embodiments, the disclosed LNP compositions may comprise a helper lipid. In some embodiments, the disclosed LNP compositions comprise a neutral lipid. In some embodiments, the disclosed LNP compositions comprise a stealth lipid. In some embodiments, the disclosed LNP compositions comprises additional lipids. Neutral lipids can function to stabilize and improve processing of the LNPs.

[0253] “Helper lipids” can refer to lipids that enhance transfection (e.g., transfection of the nanoparticle (LNP) comprising the composition as provided herein, including the biologically active agent). The mechanism by which the helper lipid enhances transfection includes enhancing particle stability. In some embodiments, the helper lipid enhances membrane fusogenicity. Helper lipids can include steroids, sterols, and alkyl resorcinols. Helper lipids suitable for use in the present disclosure can include, but are not limited to, cholesterol, 5-heptadecylresorcinol, and cholesterol hemisuccinate. In some embodiments, the helper lipid is cholesterol. In some embodiments, the helper lipid may be cholesterol hemisuccinate.

[0254] “Stealth lipids” can refer to lipids that alter the length of time the nanoparticles can exist in vivo (e.g., in the blood). Stealth lipids can assist in the formulation process by, for example, reducing particle aggregation and controlling particle size. Stealth lipids used herein may modulate pharmacokinetic properties of the LNP. Stealth lipids suitable for use in a lipid composition of the disclosure can include, but are not limited to, stealth lipids having a hydrophilic head group linked to a lipid moiety. Stealth lipids suitable for use in a lipid composition of the present disclosure and information about the biochemistry of such lipids can be found in Romberg et al, Pharmaceutical Research, Vol. 25, No. 1, 2008, pg. 55-71 and I-Toekstra et al, Biochimica et Biophysica Acta 1660 (2004) 41-52. Additional suitable PEG lipids are disclosed, e.g., in WO 2006/007712.

[0255] In some embodiments, the stealth lipid is a PEG-lipid. In one embodiment, the hydrophilic head group of stealth lipid comprises a polymer moiety selected from polymers based on PEG (sometimes referred to as poly(ethylene oxide)), poly(oxazoline), poly(vinyl alcohol), poly(glycerol), poly(N-vinylpyrrolidone), polyaminoacids and poly N-(2-hydroxypropyl)methacrylamide]. Stealth lipids can comprise a lipid moiety. In some embodiments, the lipid moiety of the stealth lipid may be derived from diacylglycerol or diacylglycamide, including those comprising a dialkylglycerol or dialkylglycamide group having alkyl chain length independently comprising from about C4 to about C40 saturated or unsaturated carbon atoms, wherein the chain may comprise one or more functional groups such as, for example, an amide or ester. The dialkylglycerol or dialkylglycamide group can further comprise one or more substituted alkyl groups.

[0256] The structures and properties of helper lipids, neutral lipids, stealth lipids, and/or other lipids are further described in WO2017173054A1, WO2019067999A1, US20180290965A1, US20180147298A1, US20160375134A1, U.S. Pat. Nos. 8,236,770, 8,021,686, 8,236,770B2, U.S. Pat. No. 7,371,404B2, U.S. Pat. No. 7,780,983B2, U.S. Pat. No. 7,858,117B2, US20180200186A1, US20070087045A1, WO2018119514A1, and WO2019067992A1, all of which are hereby incorporated by reference in their entirety.

### LNP Formulations

[0257] Particular formulation of a nanoparticle composition comprising one or more described lipids is described herein.

[0258] The described nanoparticle compositions are capable of delivering a therapeutic agent such as an RNA to a particular cell, tissue, organ, or system or group thereof in a mammal's body. Physiochemical properties of nanoparticle compositions may be altered in order to increase selectivity for particular bodily targets. For instance, particle sizes may be adjusted based on the fenestration sizes of different organs. The therapeutic agent included in a nanoparticle composition may also be selected based on the desired delivery target or targets. For example, a therapeutic agent may be selected for a particular indication, condition, disease, or disorder and/or for delivery to a particular cell, tissue, organ, or system or group thereof (e.g., localized, or specific delivery). In certain embodiments, a nanoparticle composition may include an mRNA encoding a polypeptide of interest capable of being translated within a cell to produce the polypeptide (e.g., base editor) of interest. Such a composition are capable of having specificity or affinity to a particular organ or cell type to facilitate drug substance delivery thereto, for example the liver or hepatocytes.

[0259] The amount of a therapeutic agent or drug substance (e.g., the mRNA that encodes for the base editor and the guide RNA) in an LNP composition may depend on the size, composition, desired target and/or application, or other properties of the nanoparticle composition. For example, the amount of an RNA comprised in a nanoparticle composition may depend on the size, sequence, and other characteristics of the RNA. The relative amounts of a therapeutic agent and other elements (e.g., lipids) in a nanoparticle composition may also vary. In some embodiments, the wt/wt ratio of the lipid component to a therapeutic agent in a nanoparticle composition may be from about 5:1 to about 60:1, such as about 5:1. 6:1, 7:1, 8:1, 9:1, 10:1, 11:1, 12:1, 13:1, 14:1, 15:1, 16:1, 17:1, 18:1, 19:1, 20:1, 25:1, 30:1, 35:1, 40:1, 45:1, 50:1, and 60:1. For example, the wt/wt ratio of the lipid component to a therapeutic agent may be from about 10:1 to about 40:1. In certain embodiments, the wt/wt ratio is about 20:1. The amount of a therapeutic agent in a nanoparticle composition can be measured using absorption spectroscopy (e.g., ultraviolet-visible spectroscopy).

[0260] In some embodiments, an LNP formulation comprises one or more nucleic acids such as RNAs. In some embodiments, the one or more RNAs, lipids, and amounts thereof may be selected to provide a specific N/P ratio. The N/P ratio can be selected from about 1 to about 30. The N/P ratio can be selected from about 2 to about 12. In some embodiments, the N/P ratio is from about 0.1 to about 50. In some embodiments, the N/P ratio is from about 2 to about 8. In some embodiments, the N/P ratio is from about 2 to about 15, from about 2 to about 10, from about 2 to about 8, from about 2 to about 6, from about 3 to about 15, from about 3 to about 10, from about 3 to about 8, from about 3 to about 6, from about 4 to about 15, from about 4 to about 10, from about 4 to about 8, or from about 4 to about 6. In some embodiments, the N/P ratio is about 2, about 2.5, about 3, about 3.5, about 4, about 4.5, about 5, about 5.5, about 6, about 6.5, about 7, about 7.5, about 8, about 9, or about 10. In some embodiments, the N/P ratio is from about 4 to about 6. In some embodiments, the NIP ratio is about 4, about 4.5, about 5, about 5.5, or about 6.

[0261] As used herein, the “N/P ratio” is the molar ratio of ionizable (e.g., in the physiological pH range) nitrogen atoms in a lipid (or lipids) to phosphate groups in a nucleic acid molecular entity (or nucleic acid molecular entities), e.g., in a nanoparticle composition comprising a lipid component and an RNA. Ionizable nitrogen atoms can include, for example, nitrogen atoms that can be protonated at about pH 1, about pH 2, about pH 3, about pH 4, about pH 4.5, about pH 5, about pH 5.5, about pH 6, about pH 6.5, about pH 7, about pH 7.5, or about pH 8 or higher. The physiological pH range can include, for example, the pH range of different cellular compartments (such as organs, tissues, and cells) and bodily fluids (such as blood, CSF, gastric juice, milk, bile, saliva, tears, and urine). In certain specific embodiments, the physiological pH range refers to the pH range of blood in a mammal, for example, from about 7.35 to about 7.45. Similarly, for phosphate charge neutralizers that have one or more ionizable nitrogen atoms, the N/P ratio can refer to a molar ratio of ionizable nitrogen atoms in the phosphate charge neutralizer to the phosphate groups in a nucleic acid. In some embodiments, ionizable nitrogen atoms refer to those nitrogen atoms that are ionizable within a pH range between 5 and 14.

[0262] For the payload that does not contain a phosphate group, the N/P ratio can refer to a molar ratio of ionizable nitrogen atoms in a lipid to the total negative charge in the payload. For example, the N/P ratio of an LNP composition can refer to a molar ratio of the total ionizable nitrogen atoms in the LNP composition to the total negative charge in the payload that is present in the composition.

[0263] In some embodiments, the LNPs are formed with an average encapsulation efficiency ranging from about 50% to about 70%, from about 70% to about 90%, or from about 90% to about 100%. In some embodiments, the LNPs are formed with an average encapsulation efficiency ranging from about 75% to about 98%.

[0264] In another aspect, provided herein is a lipid nanoparticle (LNP) comprising the composition as provided herein. As used herein, a “lipid nanoparticle (LNP) composition” or a “nanoparticle composition” is a composition comprising one or more described lipids. LNP compositions are typically sized on the order of micrometers or smaller and may include a lipid bilayer. Nanoparticle compositions encompass lipid nanoparticles (LNPs), liposomes (e.g., lipid vesicles), and lipoplexes. In some embodiments, a LNP refers to any particle that has a diameter of less than 1000 nm, 500 nm, 250 nm, 200 nm, 150 nm, 100 nm, 75 nm, 50 nm, or 25 nm. In some embodiments, a nanoparticle may range in size from 1-1000 nm, 1-500 nm, 1-250 nm, 25-200 nm, 40-100 nm, 50-100 nm. 50-90 nm, 50-80 nm, 50-70 nm, 55-95 nm, 55-80 nm, 55-75 nm, 60-100 nm, 60-90 nm, 60-80 nm, 60-70 nm, 25-100 nm, 25-80 nm, or 40-80 nm.

[0265] In some embodiments, an LNP may be made from cationic, anionic, or neutral lipids. In some embodiments, an LNP may comprise neutral lipids, such as the fusogenic phospholipid 1,2-dioleoyl-sn-glycero-3-phosphoethanolamine (DOPE) or the membrane component cholesterol, as helper lipids to enhance transfection activity and nanoparticle stability. In some embodiments, an LNP may comprise hydrophobic lipids, hydrophilic lipids, or both hydrophobic and hydrophilic lipids. Any lipid or combination of lipids that are known in the art can be used to produce an LNP. Examples of lipids used to produce LNPs include, but are not limited to DOTMA (N[1-(2,3-dioleyloxy)propyl]-N,N,N-trimethylammonium chloride), DOSPA (N,N-dimethyl-N-([2-sperminecarboxamido]ethyl)-2,3-bis(dioleyloxy)-1-propaniminium pentahydrochloride), DOTAP (1,2-Dioleoyl-3-trimethylammonium propane), DMRIE (N-(2-hydroxyethyl)-N,N-dimethyl-2,3-bis(tetradecyloxy-1-propanaminiumbromide), DC-cholesterol (3β-[N—(N′,N′-dimethylaminoethane)-carbamoyl]cholesterol), DOTAP-cholesterol, GAP-DMORIE-DPyPE, and GL67A-DOPE-DMPE (,2-Bis(dimethylphosphino)ethane)-polyethylene glycol (PEG). Examples of cationic lipids include, but are not limited to, 98N12-5, C12-200, DLin-KC2-DMA (KC2), DLin-MC3-DMA (MC3), XTC, MD1, and 7C1. Examples of neutral lipids include, but are not limited to, DPSC, DPPC (Dipalmitoylphosphatidylcholine), POPC (1-palmitoyl-2-oleoyl-sn-glycero-3-phosphocholine), DOPE, and SM (sphingomyelin). Examples of PEG-modified lipids include, but are not limited to, PEG-DMG (Dimyristoyl glycerol), PEG-CerC14, and PEG-CerC20. In some embodiments, the lipids may be combined in any number of molar ratios to produce an LNP. In some embodiments, the polynucleotide may be combined with lipid(s) in a wide range of molar ratios to produce an LNP.

[0266] The term “substituted”, unless otherwise indicated, refers to the replacement of one or more hydrogen radicals in a given structure with the radical of a specified substituent including, but not limited to: halo, alkyl, alkenyl, alkynyl, aryl, heterocyclyl, thiol, alkylthio, oxo, thioxy, arylthio, alkylthioalkyl, arylthioallcyl, alkylsulfonyl, alkylsulfonylalkyl, arylsulfonylalkyl, alkoxy, aryloxy, aralkoxy, aminocarbonyl, alkylaminocarbonyl, aiylaminocarbonyl, alkoxycarbonyl, aryloxycarbonyl, haloalkyl, amino, trifluoromethyl, cyano, nitro, alkylamino, arylamino, alkylaminoalkyl, aiylaminoalkyl, aminoalkylamino, hydroxy, alkoxyalkyl, carboxyalkyl, alkoxycarbonylalkyl, aminocarbonylalkyl, acyl, aralkoxycarbonyl, carboxylic acid, sulfonic acid, sulfonyl, phosphonic acid, aryl, heteroaryl, heterocyclic, and an aliphatic group. It is understood that the substituent may be further substituted. Exemplary substituents include amino, alkylamino, and the like.

[0267] As used herein, the term “substituent” means positional variables on the atoms of a core molecule that are substituted at a designated atom position, replacing one or more hydrogens on the designated atom, provided that the designated atom's normal valency is not exceeded, and that the substitution results in a stable compound. Combinations of substituents and/or variables are permissible only if such combinations result in stable compounds. A person of ordinary skill in the art should note that any carbon as well as heteroatom with valences that appear to be unsatisfied as described or shown herein is assumed to have a sufficient number of hydrogen atom(s) to satisfy the valences described or shown. In certain instances, one or more substituents having a double bond (e.g., “oxo” or “═O”) as the point of attachment may be described, shown, or listed herein within a substituent group, wherein the structure may only show a single bond as the point of attachment to the core structure of Formula (I). A person of ordinary skill in the art would understand that, while only a single bond is shown, a double bond is intended for those substituents.

[0268] The term “alkyl” refers to a straight or branched hydrocarbon chain radical, having from one to twenty carbon atoms, and which is attached to the rest of the molecule by a single bond. An alkyl comprising up to 10 carbon atoms is referred to as a C₁-C₁₀ alkyl, likewise, for example, an alkyl comprising up to 6 carbon atoms is a C₁-C₆ alkyl. Alkyls (and other moieties defined herein) comprising other numbers of carbon atoms are represented similarly. Alkyl groups include, but are not limited to, C₁-C₁₀ alkyl, C₁-C₉ alkyl, C₁-C₈ alkyl. C₁-C₇ alkyl, C₁-C₆ alkyl, C₁-C₅ alkyl, C₁-C₄ alkyl, C₁-C₃ alkyl, C₁-C₂ alkyl, C₂-C₈ alkyl, C₃-C₈ alkyl and C₄-C₅ alkyl. Representative alkyl groups include, but are not limited to, methyl, ethyl, n-propyl, 1-methylethyl (i-propyl), n-butyl, i-butyl, s-butyl, n-pentyl, 1,1-dimethylethyl (t-butyl), 3-methylhexyl, 2-methylhexyl, 1-ethyl-propyl, and the like. In some embodiments, the alkyl is methyl or ethyl. In some embodiments, the alkyl is —CH(CH₃)₂ or —C(CH₃)₃. Unless stated otherwise specifically in the specification, an alkyl group may be optionally substituted as described below. “Alkylene” or “alkylene chain” refers to a straight or branched divalent hydrocarbon chain linking the rest of the molecule to a radical group. In some embodiments, the alkylene is —CI-12-, —CH₂CH₂—, or —CH₂CH₂CH₂—. In some embodiments, the alkylene is —CH₂—. In some embodiments, the alkylene is —CH₂CH₂—. In some embodiments, the alkylene is —CH₂CH₂CH₂—.

[0269] The term “alkenyl” refers to a type of alkyl group in which at least one carbon-carbon double bond is present. In one embodiment, an alkenyl group has the formula —C(R)═CR², wherein R refers to the remaining portions of the alkenyl group, which may be the same or different. In some embodiments, R is H or an alkyl. In some embodiments, an alkenyl is selected from ethenyl (i.e., vinyl), propenyl (i.e., allyl), butenyl, pentenyl, pentadienyl, and the like. Non-limiting examples of an alkenyl group include —CH═CH₂, —C(CH₃)═CH₂, —CH═CHCH₃, —C(CH₃)═CHCH₃, and —CH₂CH═CH₂.

[0270] The term “cycloalkyl” refers to a monocyclic or polycyclic non-aromatic radical, wherein each of the atoms forming the ring (i.e., skeletal atoms) is a carbon atom. In some embodiments, cycloalkyls are saturated or partially unsaturated. In some embodiments, cycloalkyls are spirocyclic or bridged compounds. In some embodiments, cycloalkyls are fused with an aromatic ring (in which case the cycloalkyl is bonded through a non-aromatic ring carbon atom). Cycloalkyl groups include groups having from 3 to 10 ring atoms. Representative cycloalkyls include, but are not limited to, cycloalkyls having from three to ten carbon atoms, from three to eight carbon atoms, from three to six carbon atoms, or from three to five carbon atoms. Monocyclic cycloalkyl radicals include, for example, cyclopropyl, cyclobutyl, cyclopentyl, cyclohexyl, cycloheptyl, and cyclooctyl. In some embodiments, the monocyclic cycloalkyl is cyclopropyl, cyclobutyl, cyclopentyl or cyclohexyl. In some embodiments, the monocyclic cycloalkyl is cyclopentenyl or cyclohexenyl. In some embodiments, the monocyclic cycloalkyl is cyclopenteny 1. Polycyclic radicals include, for example, adamantyl, 1,2-dihydronaphthalenyl, 1,4-dihydronaphthalenyl, tetrainyl, decalinyl, 3,4-dihydronaphthalenyl-.1 (2H)-one. spiro[2.2]pentyl, norbomyl and bicycle[1.1.1]pentyl. Unless otherwise stated specifically in the specification, a cycloalkyl group may be optionally substituted. Depending on the structure, a cycloalkyl group can be monovalent or divalent (i.e., a cycloalkylene group).

[0271] The term “heterocycle” or “heterocyclic” refers to heteroaromatic rings (also known as heteroaryls) and heterocycloalkyls (also known as heteroalicyclic groups) that includes at least one heteroatom selected from nitrogen, oxygen, and sulfur, wherein each heterocyclic group has from 3 to 12 atoms in its ring system, and with the proviso that any ring does not contain two adjacent O or S atoms. A “heterocyclyl” is a univalent group formed by removing a hydrogen atom from any ring atoms of a heterocyclic compound. In some embodiments, heterocycles are monocyclic, bicyclic, polycyclic, spirocyclic or bridged compounds. Non-aromatic heterocyclic groups (also known as heterocycloalkyls) include rings having 3 to 12 atoms in its ring system and aromatic heterocyclic groups include rings having 5 to 12 atoms in its ring system. The heterocyclic groups include benzofused ring systems. Examples of non-aromatic heterocyclic groups are pyrrolidinyl, tetrahydrofuranyl, dihydrofuranyl, tetrahydrothienyl, oxazolidinonyl, tetrahydropyranyl, dihydropyranyl, tetrahydrothiopyranyl, piperidinyl, morpholinyl. thiomorpholinyl, thioxanyl, piperazinyl, aziridinyl, azetidinyl, oxetanyl, thietanyl, homopiperidinyl, oxepanyl, thiepanyl, oxazepinyl, diazepinyl, thiazepinyl, 1,2,3,6-tetrahydropyridinyl, pyrrolin-2-yl, pyrrolin-3-yl, indolinyl, 2H-pyranyl, 4Hpyranyl, dioxanyl, 1,3-dioxolanyl, pyrazolinyl, dithianyl, dithiolanyl, dihydropyranyl, dihydrothienyl, dihydrofuranyl, pyrazolidinyl, imidazolinyl, imidazoli diny I, 3-az.abicy cl o[3.1.0]hexany 1,3-azabicyclo[4.1.0]heptanyl, 3 h-indolyl, indolin-2-onyl, isoindolin-1-onyl, isoindoline-1,3-dionyl, 3,4-dihydroisoquinolin-1(2H)-onyl, 3,4-dihydroquinolin-2(1H)-onyl, isoindoline-1,3-dithionyl, benzo[d]oxazol-2(3H)-onyl, 1H-benzo[d]imidazol-2(3H)-onyl, benzo[d]thiazol-2(3H)-onyl, and quinolizinyl. Examples of aromatic heterocyclic groups are pyridinyl, imidazolyl, pyrimidinyl, pyrazolyl, triazolyl, pyrazinyl, tetrazolyl, futyl, thienyl, isoxazolyl, thiazolyl, oxazolyl, isothiazolyl, pyrrolyl, quinolinyl, isoquinolinyl, indolyl, benzimidazolyl, benzofuranyl, cinnolinyl, indazolyl, indolizinyl, phthalazinyl, pyridazinyl, triazinyl, isoindolyl, pteridinyl, purinyl, oxadiazolyl, thiadiazolyl, furaz.anyl, benzofuraz.anyl, benzothiophenyl, benzothiazolyl, benzoxazolyl, quinazolinyl, quinoxalinyl, naphthyridinyl, and furopyridinyl. The foregoing groups are either C-attached (or Clinked) or N-attached where such is possible. For instance, a group derived from pyrrole includes both pyrrol-1-yl (N-attached) or pyrrol-3-yl (C-attached). Further, a group derived from imidazole includes imidazol-1-yl or imidazol-3-yl (both N-attached) or imidazol-2-yl, imidazol-4-yl or imidazol-5-yl (all C-attached). The heterocyclic groups include benzo-fused ring systems. Non-aromatic heterocycles are optionally substituted with one or two oxo (═O) moieties, such as pyrrolidin-2-one. In some embodiments, at least one of the two rings of a bicyclic heterocycle is aromatic. In some embodiments, both rings of a bicyclic heterocycle are aromatic.

[0272] The term “heterocycloalkyl” refers to a cycloalkyl group that includes at least one heteroatom selected from nitrogen, oxygen, and sulfur. Unless stated otherwise specifically in the specification, the heterocycloalkyl radical may be a monocyclic, or bicyclic ring system, which may include fused (when fused with an aryl or a heterowyl ring, the heterocycloalkyl is bonded through a non-aromatic ring atom) or bridged ring systems. The nitrogen, carbon, or sulfur atoms in the heterocyclyl radical may be optionally oxidized. The nitrogen atom may be optionally quaternized. The heterocycloalkyl radical is partially or fully saturated. Examples of heterocycloalkyl radicals include, but are not limited to, dioxolanyl, thienyl[1,3]dithianyl, tetrahydroquinolyl, tetrahydroisoquinolyl, decahydroquinolyl, decahydroisoquinolyl, imidazolinyl, imidazolidinyl, isothiazolidinyl, isoxazolidinyl, morpholinyl, octahydroindolyl, octahydroisoindolyl, 2-oxopiperazinyl, 2-oxopiperidinyl, 2-oxopyrrolidinyl, oxazolidinyl, piperidinyl, piperazinyl, 4-piperidonyl, pyrrolidinyl, pyrazolidinyl, quinuclidinyl, thiazolidinyl, tetrahydrofuryl, trithianyl, tetrahydropyranyl, thiomorpholinyl, thiamorpholinyl, 1-oxothiomorpholinyl, 1,1-dioxo-thiomorpholinyl. The term heterocycloalkyl also includes all ring forms of carbohydrates, including but not limited to monosaccharides, disaccharides, and oligosaccharides. Unless otherwise noted, heterocycloalkyls have from 2 to 12 carbons in the ring. In some embodiments, heterocycloalkyls have from 2 to 10 carbons in the ring. In some embodiments, heterocycloalkyls have from 2 to 10 carbons in the ring and 1 or 2 N atoms. In some embodiments, heterocycloalkyls have from 2 to 10 carbons in the ring and 3 or 4 N atoms. In some embodiments, heterocycloalkyls have from 2 to 12 carbons, 0-2 N atoms, 0-2 O atoms, 0-2 P atoms, and 0-1 S atoms in the ring. In some embodiments, heterocycloalkyls have from 2 to 12 carbons, 1-3 N atoms, 0-1 O atoms, and 0-1 S atoms in the ring. It is understood that when referring to the number of carbon atoms in a heterocycloalkyl, the number of carbon atoms in the heterocycloalkyl is not the same as the total number of atoms (including the heteroatoms) that make up the heterocycloalkyl (i.e., skeletal atoms of the heterocycloalkyl ring). Unless stated otherwise specifically in the specification, a heterocycloalkyl group may be optionally substituted. As used herein, the term “teterocycloalkylene” can refer to a divalent heterocycloalkyl group.

[0273] The term “heteroaryl” refers to an aryl group that includes one or more ring heteroatoms selected from nitrogen, oxygen, and sulfur. The heteroaryl is monocyclic or bicyclic. Illustrative examples of monocyclic heteroaryls include pyridinyl, imidazolyl, pyrimidinyl, pyrazolyl, triazolyl, pyrazinyl, tetrazolyl, furyl, thienyl, isoxazolyl, thiazolyl, oxazolyl, isothiazolyl, pyrrolyl, pyridazinyl, triazinyl, oxadiazolyl, thiadiazolyl, furazanyl, indolizine, indole, benzofuran, benzothiophene, indazole, benzimidazole, purine, quinolizine, quinoline, isoquinoline, cinnoline, phthalazine, quinazoline, quinoxaline, 1,8-naphthyridine, and pteridine. Illustrative examples of monocyclic heteroaryls include pyridinyl, imidazolyl, pyrimidinyl, pyrazolyl, triazolyl, pyrazinyl, tetrazolyl, furyl, thienyl, isoxazolyl, thiazolyl, oxazolyl, isothiazolyl, pyrrolyl, pyridazinyl, triazinyl, oxadiazolyl, thiadiazolyl, and furazanyl. Illustrative examples of bicyclic heteroaryls include indolizine, indole, benzofuran, benzothiophene, indazole, benzimidazole, purine, quinolizine, quinoline, isoquinoline, cinnoline, phthalazine, quinazoline, quinoxaline, 1,8-naphthyridine, and pteridine. In some embodiments, heteroaryl is pyridinyl, pyrazinyl, pyrimidinyl, thiazolyl, thienyl, thiadiazolyl or furyl. In some embodiments, a heteroaryl contains 0-6 N atoms in the ring. In some embodiments, a heteroaryl contains 1-4 N atoms in the ring. In some embodiments, a heteroaryl contains 4-6 N atoms in the ring. In some embodiments, a heteroaryl contains 0-4 N atoms, 0-1 O atoms, 0-1 P atoms, and 0-1 S atoms in the ring. In some embodiments, a heteroaryl contains 1-4 N atoms, 0-1 O atoms, and 0-1 S atoms in the ring. In some embodiments, heteroaryl is a C₁-C₉ heteroaryl. In some embodiments, monocyclic heteroaryl is a C₁-C₅ heteroaryl. In some embodiments, monocyclic heteroaryl is a 5-membered or 6-membered heteroaryl. In some embodiments, a bicyclic heteroaryl is a C₆-C₉ heteroaryl. In some embodiments, a heteroaryl group is partially reduced to form a heterocycloalkyl group defined herein. In some embodiments, a heteroaryl group is fully reduced to form a heterocycloalkyl group defined herein.

[0274] As used herein, amino lipids can contain at least one primary, secondary, or tertiary amine moiety that is protonatable (or ionizable) between pH range 4 and 14. In some embodiments, the amine moiety/moieties function as the hydrophilic headgroup of the amino lipids. When most of the amine moiety(ies) of an amino lipid (or amino lipids) in a nucleic acid-lipid nanoparticle formulation is protonated at physiological pH, then the nanoparticles can be termed as cationic lipid nanoparticle (cLNP). When most of the amine moiety(ies) of an amino lipid (or amino lipids) in a nucleic acid-lipid nanoparticle formulation is not protonated at physiological pH but can be protonated at acidic pH, endosomal pH for example, can be termed as ionizable lipid nanoparticle (iLNP). The amino lipids that constitute cLNPs can be generally called cationic amino lipids (cLi pids). The amino lipids that constitute iLNPs can be called ionizable amino lipids (iLipids). The amino lipid can be an iLipid or a cLipid at physiological pH.

[0275] As used herein, LNP compositions or formulations are typically sized on the order of micrometers or smaller and may include a lipid bilayer. Nanoparticle compositions encompass lipid nanoparticles (LNPs), liposomes lipid vesicles), and lipoplexesnanoparticle composition a liposome having a lipid bilayer with a diameter of 500 nm or less. The LNPs described herein can have a mean diameter of from about 1 nm to about 2500 nm, from about 10 nm to about 1500 nm, from about 20 nm to about 1000 nm, from about 30 nm to about 150 nm, from about 40 nm to about 150 nm, from about 50 nm to about 150 nm, from about 60 nm to about 130 nm, from about 70 nm to about 110 nm, from about 70 nm to about 100 nm, from about 80 nm to about 100 nm, from about 90 nm to about 100 nm, from about 70 to about 90 nm, from about 80 nm to about 90 nm or from about 70 nm to about 80 nm. The LNPs described herein can have a mean diameter of about 30 nm, 35 nm, 40 nm, 45 nm, 50 nm, 55 nm, 60 nm, 65 nm, 70 nm, 75 nm, 80 nm, 85 nm, 90 nm, 95 nm, 100 nm, 105 nm, 110 nm, 115 nm, 120 nm, 125 nm, 130 nm, 135 nm, 140 nm, 145 nm, 150 nm, or greater. The LNPs described herein can be substantially non-toxic.

[0276] As used herein, a “phospholipid” can refer to a lipid that includes a phosphate moiety and one or more carbon chains, such as unsaturated fatty acid chains. A phospholipid may include one or more multiple (e.g., double or triple) bonds. In some embodiments, a phospholipid may facilitate fusion to a membrane. For example, a cationic phospholipid may interact with one or more negatively charged phospholipids of a membrane (e.g., a cellular or intracellular membrane). Fusion of a phospholipid to a membrane may allow one or more elements of an LNP to pass through the membrane, i.e., delivery of the one or more elements to a cell.

### Payload

[0277] The LNPs described herein can be designed to deliver a payload, such as one or more therapeutic agent(s) or drug substances(s) to a target cell or organ of interest. In some embodiments, a LNP described herein encloses one or more components of a base editor system as described herein. For example, a LNP may enclose one or more of a guide RNA, a nucleic acid encoding the guide RNA, a vector encoding the guide RNA, a base editor fusion protein, a nucleic acid encoding the base editor fusion protein, a programmable DNA binding domain, a nucleic acid encoding the programmable DNA binding domain, a deaminase, a nucleic acid encoding the deaminase, or all or any combination thereof. In some embodiments, the nucleic acid is a DNA. In some embodiments, the nucleic acid is a RNA, for example, a mRNA and/or a guide RNA. In some embodiments, the said nucleic acid(s) is/are chemically modified.

[0278] In some embodiments, the payload comprises one or more nucleic acid(s) (i.e., one or more nucleic acid molecular entities). In some embodiments, the nucleic acid is a single-stranded nucleic acid. In some embodiments, single-stranded nucleic acid is a DNA. In some embodiments, single-stranded nucleic acid is an RNA. In some embodiments, the nucleic acid is a double-stranded nucleic acid. In some embodiments, the double-stranded nucleic acid is a DNA. In some embodiments, the double-stranded nucleic acid is an RNA. In some embodiments, the double-stranded nucleic acid is a DNA-RNA hybrid. In some embodiments, the nucleic acid is a messenger RNA (mRNA), a microRNA, an asymmetrical interfering RNA (aiRNA), a small hairpin RNA (shRNA), an antisense oligonucleotide, or a Dicer-Substrate dsRNA. In some embodiments, the single-stranded nucleic acids form secondary structure, one or more stem-loops for example. In some other embodiments, the single stranded nucleic acids contain one or more stem-loops and single-stranded regions within the molecule.

### Kits

[0279] It is contemplated herein that the therapeutic agents or drug substances disclosed herein are part of a kit as described herein. Accordingly, one aspect of the disclosure relates to kits including the compositions comprising a single guide RNA as provided herein, the base editor system and complex as provided herein, the composition as provided herein, and/or the lipid nanoparticle formulations as provided herein for treating or preventing a condition. The kits can further include one or more additional therapeutic regimens or agents for treating or preventing a condition.

[0280] Also disclosed herein, in certain embodiments, are kits and articles of manufacture for use with one or more methods described herein. Such kits include a carrier, package, or container that is compartmentalized to receive one or more containers such as vials, tubes, and the like, each of the container(s) comprising one of the separate elements to be used in a method described herein. Suitable containers include, for example, bottles, vials, syringes, and test tubes. In one embodiment, the containers are formed from a variety of materials such as glass or plastic.

[0281] The articles of manufacture provided herein contain packaging materials. Examples of pharmaceutical packaging materials include, but are not limited to, blister packs, bottles, tubes, bags, containers, bottles, and any packaging material suitable for a selected formulation and intended mode of administration and treatment.

[0282] For example, the container(s) include a composition as described herein, and optionally in addition with therapeutic regimens or agents disclosed herein. Such kits optionally include an identifying description or label or instructions relating to its use in the methods described herein.

[0283] A kit typically includes labels listing contents and/or instructions for use, and package inserts with instructions for use. A set of instructions will also typically be included.

[0284] In embodiments, a label is on or associated with the container. In one embodiment, a label is on a container when letters, numbers or other characters forming the label are attached, molded, or etched into the container itself, a label is associated with a container when it is present within a receptacle or carrier that also holds the container, e.g., as a package insert. In one embodiment, a label is used to indicate that the contents are to be used for a specific therapeutic application. The label also indicates directions for use of the contents, such as in the methods described herein.

### Dosing

[0285] The skilled artisan will appreciate that certain factors may influence the dosage and frequency of administration required to effectively treat a subject, including but not limited to the severity of the disease or disorder, previous treatments, the general characteristics of the subject including health, sex, weight and/or age of the subject, and other diseases present. Moreover, treatment of a subject with a therapeutically effective amount of the compositions can include a single treatment or, preferably, can include a series of treatments. It will also be appreciated that the effective dosage of the composition of the disclosure used for treatment may increase or decrease over the course of a particular treatment. Changes in dosage may result and become apparent from the results of diagnostic assays as described herein. The therapeutically effective dosage will generally be dependent on the patient's status at the time of administration. The precise amount can be determined by routine experimentation but may ultimately lie with the judgment of the clinician, for example, by monitoring the patient for signs of disease and adjusting the treatment accordingly.

[0286] Frequency of administration may be determined and adjusted over the course of therapy, and is generally, but not necessarily, based on treatment and/or suppression and/or amelioration and/or delay of a disease. Alternatively, sustained continuous release formulations of a polypeptide or a polynucleotide may be appropriate. Various formulations and devices for achieving sustained release are known in the art. In some embodiments, dosage is daily, every other day, every three days, every four days, every five days, or every six days. In some embodiments, dosing frequency is once every week, every 2 weeks, every 4 weeks, every 5 weeks, every 6 weeks, every 7 weeks, every 8 weeks, every 9 weeks, or every 10 weeks; or once every month, every 2 months, or every 3 months, or longer. The progress of this therapy is easily monitored by conventional techniques and assays.

[0287] The dosing regimen (including a composition disclosed herein) can vary over time. In some embodiments, it is contemplated that for an adult subject of normal weight, doses ranging from about 0.01 to 1000 mg/kg may be administered. In some embodiments, the dose is between 1 to 200 mg. In some embodiments the dosing may be between 0.03 mg/kg to 3 mg/kg or anywhere therebetween. The particular dosage regimen, i.e., dose, timing, and repetition, will depend on the particular subject and that subject's medical history, as well as the properties of the polypeptide or the polynucleotide (such as the half-life of the polypeptide or the polynucleotide, and other considerations well known in the art).

[0288] The appropriate therapeutic dosage of a composition as described herein will depend on the specific agent (or compositions thereof) employed, the formulation and route of administration, the type and severity of the disease, whether the polypeptide or the polynucleotide is administered for preventive or therapeutic purposes, previous therapy, the subject's clinical history and response to the antagonist, and the discretion of the attending physician. Typically, the clinician will administer a polypeptide until a dosage is reached that achieves the desired result.

[0289] Administration of one or more compositions can be continuous or intermittent, depending, for example, upon the recipient's physiological condition, whether the purpose of the administration is therapeutic or prophylactic, and other factors known to skilled practitioners. The administration of a composition may be essentially continuous over a preselected period of time or may be in a series of spaced dose, e.g., either before, during, or after developing a disease.

[0290] The methods and compositions of the disclosure described herein including embodiments thereof can be administered with one or more additional therapeutic regimens or agents or treatments, which can be co-administered to the mammal. By “co-administering” is meant administering one or more additional therapeutic regimens or agents or treatments and the composition of the disclosure sufficiently close in time to enhance the effect of one or more additional therapeutic agents, or vice versa. In this regard, the composition of the disclosure described herein can be administered simultaneously with one or more additional therapeutic regimens or agents or treatments, at a different time, or on an entirely different therapeutic schedule (e.g., the first treatment can be daily, while the additional treatment is weekly). For example, in embodiments, the secondary therapeutic regimens or agents or treatments are administered simultaneously, prior to, or subsequent to the composition of the disclosure.

[0291] In embodiments, a polynucleotide encoding a base editor fusion protein and a guide RNA are administered to a subject. In embodiments, the polynucleotide encoding the base editor fusion protein is an mRNA. In embodiments, the dose of the polynucleotide encoding a base editor fusion protein and the guide RNA combined is 0.01 mg/kg to 10 mg/kg, such as 0.5 mg/kg to 5 mg/kg, 1 mg/kg, 2 mg/kg, 3 mg/kg, or the like. In embodiments, a LNP comprising such amounts of the polynucleotide encoding a base editor fusion protein and the guide RNA are administered to the subject. In embodiments, the subject is a primate. In embodiments, the subject is a non-human primate. In embodiments, the non-human primate is a cynomolgus monkey.

[0292] In embodiments, administration of the guide RNA and the polynucleotide encoding the base editor fusion protein to a non-human primate, such as a cynomolgus monkey results base alteration in 20% or more, 25% or more, 30% or more, 35% or more, 40% or more, 45% or more 50% or more, 55% or more, or 60% or more whole liver cells as measured by next generation sequencing. In embodiments, such base alteration percentages are achieved when the subject is administered a combined dose of the guide RNA and the polynucleotide encoding the base editor fusion protein of 0.5 mg/kg, 1 mg/kg, 2 mg/kg, or 3 mg/kg. In embodiments, such doses are administered in LNPs. In embodiments, such administration results in reduced serum TTR levels.

[0293] The present invention is illustrated by the following examples. It is to be understood that the particular examples, materials, amounts, and procedures are to be interpreted broadly in accordance with the scope and spirit of the invention as set forth herein.

### EXAMPLES

### Example 1

### Guides for Adenine Base Editing of the TTR Gene

[0294] With this example, gRNA sequences were identified that permit ABE8.8 (and other ABE variants containing Streptococcus pyogenes Cas9, such as ABE7.10, or another Cas protein that can use the NGG PAM) to either: 1) disrupt the start codon, or 2) disrupt splice sites, whether donors or acceptors, via A→G editing within its editing window (roughly positions 4 to 7 in the 20-nt protospacer region of DNA). Five sequences were identified throughout the human TTR gene (Table 1). gRNAs were synthesized matching each of the protospacer sequences and otherwise conforming to the standard 100-nt Streptococcus pyogenes CRISPR gRNA sequence, with each gRNA molecule having a minimal degree of chemical modifications (specified in Table 1). Each of the gRNAs was co-transfected with an equivalent amount of in vitro transcribed ABE8.8 mRNA (1:1 ratio by molecular weight) into primary human hepatocytes via MessengerMax reagent (Lipofectamine), using various dilutions (2500, 1250, 625 ng/RNA/mL) to assess for editing activity at different concentrations of test article.

TABLE 1
TTR Guides

| gRNA | | Protospacer | |
|---|---|---|---|
| ID | Species | (5′-3′) | gRNA sequence (5′-3′) |
| GA457 | Human | GCCATCCTGC | gscscsAUCCUGCCAAGAAUGAGGUUUUAGAGCUAGAAA |
| | | CAAGAATGAG | UAGCAAGUUAAAAUAAGGCUAGUCCGUUAUCAACUUGAA |
| | | (SEQ ID | AAAGUGGCACCGAGUCGGUGCUsususu (SEQ ID |
| | | NO: 24) | NO: 11) |
| GA519 | Cyno | GCCATCCTGC | gscscsAUCCUGCCAAGAACGAGgUUUUAGagcuaGaaa |
| | | CAAGAACGAG | uagcaaGUUaAaAuAaggcuaGUccGUUAucAAcuuGaa |
| | | (SEQ ID | aaagugGcaccgagucggugcuususus (SEQ ID |
| | | NO: 28) | NO: 16) |
| GA458 | Cyno | GCCATCCTGC | gscscsAUCCUGCCAAGAACGAGGUUUUAGAGCUAGAAA |
| | | CAAGAACGAG | UAGCAAGUUAAAAUAAGGCUAGUCCGUUAUCAACUUGAA |
| | | (SEQ ID | AAAGUGGCACCGAGUCGGUGCUsususu (SEQ ID |
| | | NO: 28) | NO: 29) |
| GA459 | Human | GCAACTTACC | gscsasACUUACCCAGAGGCAAAGUUUUAGAGCUAGAAA |
| | | CAGAGGCAAA | UAGCAAGUUAAAAUAAGGCUAGUCCGUUAUCAACUUGAA |
| | | (SEQ ID | AAAGUGGCACCGAGUCGGUGCUsususu (SEQ ID |
| | | NO: 25) | NO: 13) |
| GA460 | Human/ | TATAGGAAAA | usasusAGGAAAACCAGUGAGUCGUUUUAGAGCUAGAAA |
| | Cyno | CCAGTGAGTC | UAGCAAGUUAAAAUAAGGCUAGUCCGUUAUCAACUUGAA |
| | | (SEQ ID | AAAGUGGCACCGAGUCGGUGCUsususu (SEQ ID |
| | | NO: 26) | NO: 14) |
| GA520 | Human/ | TATAGGAAAA | usasusAGGAAAACCAGUGAGUCgUUUUAGagcuaGaaa |
| | Cyno | CCAGTGAGTC | uagcaaGUUaAaAuAaggcuaGUccGUUAucAAcuuGaa |
| | | (SEQ ID | aaagugGcaccgagucggugcuususus (SEQ ID |
| | | NO: 26) | NO: 17) |
| GA461 | Human/ | TACTCACCTC | usascsUCACCUCUGCAUGCUCAGUUUUAGAGCUAGAAA |
| | Cyno | TGCATGCTCA | UAGCAAGUUAAAAUAAGGCUAGUCCGUUAUCAACUUGAA |
| | | (SEQ ID | AAAGUGGCACCGAGUCGGUGCUsususu (SEQ ID |
| | | NO: 27) | NO: 15) |

Letters in the sequences:-
A: adenosine;
C: cytidine;
G: guanosine;
U: uridine;
a: 2′-O-methyladenosine;
c: 2′-O-methylcytidine;
g: 2′-O-methylguanosine;
u: 2′-O-methyluridine; and
s: phosphorothioate (PS) backbone linkage.
Bold type in gRNA sequence denotes spacer sequence corresponding to Protospacer.
GA460 and GA520 have the same protospacer sequence but have different chemical modifications in the gRNA sequence.

[0295] For orthogonal protospacer sequences of the corresponding cynomolgus monkey TTR gene sequence, each gRNA was also transfected with an equivalent amount of ABE8.8 mRNA (1:1 ratio by molecular weight) into primary cynomolgus hepatocytes at 5000, 2500, 1250, 625, 312.5, and 156.25 ng/RNA/mL. The mRNA, and corresponding amino acid, sequence of the ABE8.8 (MA004) used in shown below in Table 11. Three days after transfection, genomic DNA was harvested from the hepatocytes, and assessed for base editing with next-generation sequencing of PCR amplicons generated around the target splice site. Several sites exhibited high editing efficiency. In particular, GA457 (GA458 is the cynomolgus equivalent), GA460, and GA461 showed high editing activity in both human and cynomolgus primary hepatocytes. See FIGS. 5A-5C, FIG. 6, and Tables 2-3.

TABLE 2
Editing activity in human primary hepatocytes

| | | Human hepatocytes - Editing % | | | | | |
|---|---|---|---|---|---|---|---|
| gRNA | | 2500, | 2500, | 1250, | 1250, | 625, | 625, |
| ID | Protospacer (5′-3′) | rep 1 | rep 2 | rep 1 | rep 2 | rep 1 | rep 2 |
| GA457 | GCCATCCTGCCAAGAATGAG | 33.96 | 31.31 | 26.49 | 24.86 | 17.24 | 15.39 |
| | (SEQ ID NO: 24) | | | | | | |
| GA459 | GCAACTTACCCAGAGGCAAA | 8.5 | 8.69 | 5.46 | 6.15 | 3.79 | 3.89 |
| | (SEQ ID NO: 25) | | | | | | |
| GA460 | TATAGGAAAACCAGTGAGTC | 47.61 | 47.79 | 38.33 | 35.8 | 23.77 | 22.27 |
| | (SEQ ID NO: 26) | | | | | | |
| GA461 | TACTCACCTCTGCATGCTCA | 40.42 | 39.43 | 32.82 | 32.38 | 21.81 | 22.31 |
| | (SEQ ID NO: 27) | | | | | | |

TABLE 3
Editing activity in cyno primary hepatocytes

| gRNA | Protospacer | Cyno hepatocytes - Editing % | | | | | |
|---|---|---|---|---|---|---|---|
| ID | (5′-3′) | 5000 | 2500 | 1250 | 625 | 312.5 | 156.25 |
| GA458 | GCCATCCTGCC | 35.91 | 27.25 | 22.74 | 16.07 | 10.65 | 6.06 |
| | AAGAACGAG | | | | | | |
| | (SEQ ID NO: | | | | | | |
| | 28) | | | | | | |
| GA460 | TATAGGAAAAC | 40.16 | 38.25 | 31.71 | 18.44 | 11.22 | 1.62 |
| | CAGTGAGTC | | | | | | |
| | (SEQ ID NO: | | | | | | |
| | 26) | | | | | | |
| GA461 | TACTCACCTCT | 37.53 | 29.8 | 19.46 | 13.16 | 7.45 | 0.07 |
| | GCATGCTCA | | | | | | |
| | (SEQ ID NO: | | | | | | |
| | 27) | | | | | | |

[0296] Results presented in Tables 2 and 3 are to be understood to be representative of results that may be achieved in accordance with the teachings provided herein. Compositions for editing a TTR gene according to the invention may produce editing activity that varies from the activity set forth in Table 2 or Table 3 by 10% or more, 20% or more, 30% or more, 40% or more, 50% or more, 60% or more, 70% or more, 80% or more, 90% or more, or 100% or more. In some embodiments, the compositions provide editing activity that is within 100%, within 90%, within 80%, with 70%, within 60%, within 50%, within 40%, within 30% or more, within 20% or more, or within 10% of the activity as set forth in Table 2 or Table 3.

### Example 2

### Off Target Analysis

[0297] With a view towards establishing the safety of a base-editing therapy knocking down of TTR in the human liver in vivo, off-target mutagenesis analysis is assessed in primary human hepatocytes. Following the ONE-seq procedures detailed in PCT/US19/27788 (“Highly Sensitive in vitro Assays to Define Substrate Preferences and Sites of Nucleic-Acid Binding, Modifying, and Cleaving Agents”), off-target editing in human hepatocytes was assessed. A simplified flowchart of off-target analysis with the ONE-seq procedure is shown in FIG. 7. The in vitro biochemical assay ONE-seq was used to generate a list of candidate off-target sites and to determine the propensity of a ribonucleoprotein comprising the ABE8.8 base editor protein and each of the three protospacer guides sequences (GA457, GA460, and GA461) to cleave oligonucleotides in a library. The results from ONE-seq analysis of libraries generated for GA457, GA460, and GA461 are shown in Tables 8-10, with candidate off-target sites listed.

[0298] The methodology for ONE-seq is as follows: the design of a ONE-seq library starts with the computational identification of sites in a reference genome that have sequence homology to the on-target. For human ONE-seq libraries, the reference human genome (GRCh38, Ensembl v98, chromosomes ftp://ftp.ensembl.org/pub/release-98/fasta/homo_sapiens/dna/Homo_sapiens.GRCh38.dna.chromosome.{1-22,X,Y,MT}.fa and ftp://ftp.ensembl.org/pub/release-98/fasta/homo_sapiens/dna/Homo_sapiens.GRCh38.dna.nonchromosomal.fa), was searched for potential off-target sites with up to 6 mismatches to the protospacer sequence above, and sites with up to 4 mismatches plus up to 2 DNA or RNA bulges, using Cas-Designer v1.2 (http://www.rgenome.net/cas-designer/).

[0299] Sites with up to 6 mismatches and no bulges are referred to using a X<number of mismatches><number of bulges> code. As such, the on-target site is labelled as X00; a site with 1 mismatch to the on-target and no bulges is labelled as X10, and so on. Sites with DNA bulges are referred to with a similar nomenclature, DNA<number of mismatches><number of bulges>. As such, a site with 4 mismatches to the on-target and 2 DNA bulges is labelled as DNA42. The same nomenclature is used for RNA bulges, but these are coded as RNA<number of mismatches><number of bulges>.

[0300] The protospacer sequences identified were extended by 10 nucleotides (nt) on both sides with adjacent sequence from the respective reference genome (these regions are herein referred to as the genomic context). These extended sequences were then padded by additional sequences up to a final length of approximately 200 nt, including 6 predefined constant regions of different nucleotide composition and sequence length; 2 copies of a 14-nt site-specific barcode, one on each side of the central protospacer sequence; and 2 distinct 11-nt unique molecular identifiers (UMIs), one on each side of the central protospacer sequence. The UMIs are used to correct for bias from PCR amplification, and the barcodes allow for the unambiguous identification of each site during analysis. The barcodes are selected from an initial list of 668,420 barcodes, which contain neither a CC nor a GG in their sequences, and each barcode has a Hamming distance of 2 from any other barcode. A custom Python script was used for designing the final library.

[0301] The final oligonucleotide libraries are synthesized by a commercial vendor (Agilent Technologies). Each library is PCR-amplified and subjected to 1.25× AMPure XP bead purification (Beckman Coulter). After incubation at 25° C. for 10 minutes in CutSmart buffer (New England Biolabs), RNP comprising 769 nM recombinant ABE8.8-m protein and 1.54 μM gRNA is mixed with 100 ng of the purified library and incubated at 37° C. for 8 hours. The RNP dose is derived from an analysis documenting that it is a super-saturating dose, ie, above the dose that achieves the maximum amount of on-target editing in the biochemical assay.

[0302] Proteinase K (New England Biolabs) is added to quench the reaction at 37° C. for 45 minutes, followed by 2× AMPure XP bead purification. The reaction is then serially incubated with EndoV (New England Biolabs) at 37° C. for 30 minutes, Klenow Fragment (New England Biolabs) at 37° C. for 30 minutes, and NEBNext Ultra II End Prep Enzyme Mix (New England Biolabs) at 20° C. for 30 minutes followed by 65° C. for 30 minutes, with 2× AMPure XP bead purification after each incubation. The reaction is ligated with an annealed adaptor oligonucleotide duplex at 20° C. for 1 hour to facilitate PCR amplification of the cleaved library products, followed by 2× AMPure XP bead purification. Size selection of the ligated reaction is performed on a PippinHT system (Sage Sciences) to isolate DNA of 150 to 200 bp on a 3% agarose gel cassette, followed by 2 rounds of PCR amplification to generate a barcoded library, which undergoes paired-end sequencing on an Illumina MiSeq System as described above.

[0303] Two cleavage products are obtained in a ONE-seq experiment. The PROTO side includes the part of the oligonucleotide upstream of the cleavage position, whereas the PAM side includes part of the oligonucleotide downstream of the cleavage position. In an ABE experiment, only the PROTO side is informative of editing activity (an A-G substitution); therefore, only this side is sequenced.

[0304] Paired-end reads were trimmed for sequencing adapters using trimmomatic v0.39 (Bolger et al., 2014) with custom Nextera adapters (PrefixPE/1: 5′-ACACTCTTTCCCTACACGACGCTCTTCCGATCT-3′ (SEQ ID NO: 30); PrefixPE/2: 5′-GTGACTGGAGTTCAGACGTGTGCTCTTCCGATCT-3′ (SEQ ID NO: 31); as specified in file) and parameters “ILLUMINACLIP:NEB_custom.fa:2:30:10:1:true LEADING:0 TRAILING:0 SLIDINGWINDOW:4:30 MINLEN:36”. For experiments with lower sequencing quality (VOL014), these parameters were set to “ILLUMINACLIP NEB_custom.fa:2:30:10:1:true LEADING:2 TRAILING:0 SLIDINGWINDOW:30:30 MINLEN:36”. Reads were then merged using FLASH v1.2.11 (Magoc and Salzberg, 2011) with parameters “--max-mismatch-density=0.25--max-overlap=160”. Merged reads were scanned for the constant sequences, barcodes and protospacer sequences unique to each site, and filtered to those with evidence of an A→G substitution in the editing window (defined as the 1-10 most PAM-distal positions of the protospacer). Duplicated reads were discarded.

[0305] For each site, the total number of edited reads was normalized to the total number of edited reads assigned to the on-target site, and this ratio defines the ONE-seq score for the site. Sites were ranked by ONE-seq score, and those with a score equal to or larger than 0.001, were selected for validation. A score equal to or larger than 0.001 encompasses sites that have down to 1000-fold less editing activity in the biochemical assay compared to editing of the on-target site. This threshold is based on the premise that in cells, if there is 10000 on-target editing, 1/1000-fold less editing activity would translate to % 0.1% off-target editing, which falls below the lower limit of detection of editing by NGS. Oligonucleotides with higher sequence counts reflect a higher propensity for Cas9/gRNA cleavage in vitro and hence for greater potential of off-target mutagenesis in cells.

[0306] Several candidate off-target sites were analyzed for off-target editing in human primary hepatocytes. Table 4 shows the results from validating 47 candidate off-target sites for guide RNA GA457, from cells co-transfected with gRNA and an equivalent amount of in vitro transcribed ABE8.8 mRNA (1:1 ratio by molecular weight) into primary human hepatocytes via MessengerMax reagent (Lipofectamine). The on-target site has high editing efficiency, while all off-target sites show little to no editing (less than 0.40 net editing).

TABLE 4
GA457 validation against 47 potential off-target
candidate sites in human primary hepatocytes

| | | | % Editing - human | | |
|---|---|---|---|---|---|
| GA457 | | SEQ ID | primary hepatocytes | | |
| ID | Sequence (5′-3′) | NO: | Treated | Untreated | Net |
| On-target | GCCATCCTGCCAAGAATGAG | 24 | 54.21 | 0.11 | 54.1 |
| OT1 | GCCATCCTACCAGGAATGAA | 32 | 0.28 | 0.13 | 0.15 |
| OT2 | GCCATCTTGCCAAGAAAAAG | 33 | 0.12 | 0.09 | 0.03 |
| OT3 | GCCATACCTGCCATGAATGAG | 34 | 0.2 | 0.19 | 0.01 |
| OT4 | GCCATCCTGACAGGAATGAG | 35 | 0.24 | 0.38 | −0.14 |
| OT5 | ACCATCCTGCAAAGAATGAT | 36 | 0.18 | 0.24 | −0.06 |
| OT6 | GCCATCCAATAAGAATGAG | 37 | 0.69 | 0.32 | 0.37 |
| OT7 | GCCATCCTGACAAGTATGAG | 38 | 0.29 | 0.22 | 0.07 |
| OT8 | CCATACCTGCCAAGAATGAA | 39 | 0.18 | 0.15 | 0.03 |
| OT9 | TGCATCCTGCCAAAAATGGG | 40 | 0.06 | 0.08 | −0.02 |
| OT10 | TGCATCCTGCCAAGAAGAAG | 41 | 0.06 | 0.08 | −0.02 |
| OT11 | GCCATCCTCCAAGAATGCT | 42 | 0.13 | 0.13 | 0 |
| OT12 | GCCATCTGCAAGAAGGAG | 43 | 0.11 | 0.19 | −0.08 |
| OT13 | GCCATCCTATCAAGAATAAA | 44 | 0.22 | 0.2 | 0.02 |
| OT14 | TCCATCCTGTAAGAATGAG | 45 | 0.03 | 0.05 | −0.02 |
| OT15 | GGCCATCTGCCAAGAAGGAT | 46 | 0.12 | 0.13 | −0.01 |
| OT16 | ACCATCCTGCCAGCAATGTG | 47 | 0.17 | 0.12 | 0.05 |
| OT17 | TCCATCCTACTAAGAATGAG | 48 | 0.11 | 0.13 | −0.02 |
| OT18 | GGTATCCTGCCAAGAATGGA | 49 | 0.09 | 0.1 | −0.01 |
| OT19 | TCCATCCTGCCAAGAATTGC | 50 | 0.14 | 0.07 | 0.07 |
| OT20 | GCCATCTGCAAGAATGAG | 51 | 0.15 | 0.18 | −0.03 |
| OT21 | GCCATCCTGCAAATATGAG | 52 | 0.04 | 0.07 | −0.03 |
| OT22 | ACCATCCTGTCAAGAATCAA | 53 | 0.2 | 0.15 | 0.05 |
| OT23 | GCCATACTAACAAGAATGAG | 54 | 0.25 | 0.23 | 0.02 |
| OT24 | GTGATCCTGCCAGGAATAAG | 55 | 0.08 | 0.11 | −0.03 |
| OT25 | GCCATCAAGCAAGAATGAG | 56 | 0.3 | 0.27 | 0.03 |
| OT26 | GCCATCCTCACAAGTATGAG | 57 | 0.19 | 0.22 | −0.03 |
| OT27 | ACCATCCAGCAAGAATGAG | 58 | 0.43 | 0.32 | 0.11 |
| OT28 | GCCATATGCCAAAAAGGAG | 59 | 0.24 | 0.24 | 0 |
| OT29 | GACATCCTGTCAAGGATCAG | 60 | 0.21 | 0.16 | 0.05 |
| OT30 | GCCATAGCCAAAAATGAA | 61 | 0.18 | 0.27 | −0.09 |
| OT31 | GCCATAAGCCAAAGAATGAC | 62 | 0.09 | 0 | 0.09 |
| OT32 | GCCATCCTAACAAGTATGAG | 63 | 0.25 | 0.45 | −0.2 |
| OT33 | CATATCCTGCCAGAATGAG | 64 | 0.15 | 0.21 | −0.06 |
| OT34 | TACATCCTACCAAGGAATCAG | 65 | 0.29 | 0.26 | 0.03 |
| OT35 | CCCATCCTGCCAAGAAGTGT | 66 | 0.08 | 0.06 | 0.02 |
| OT36 | GCCATCCTACAAAAATGAG | 67 | 0.16 | 0.21 | −0.05 |
| OT37 | GTCATCCTGCCAGGAATGAA | 68 | 0.09 | 0.07 | 0.02 |
| OT38 | GCCATATCTGCCAAGAATGCG | 69 | 0.16 | 0.16 | 0 |
| OT39 | TCCATCCTGTCAAGAATGTG | 70 | 0.05 | 0.04 | 0.01 |
| OT40 | TCCATCCTCCAGAATGAG | 71 | 0.07 | 0.08 | −0.01 |
| OT41 | GCCATGCTGCCAAGAATGAT | 72 | 0.15 | 0.16 | −0.01 |
| OT42 | GCTATCCTGCCAGAATGAG | 73 | 0.07 | 0.07 | 0 |
| OT43 | TGCATCCTGACAAGAAATAG | 74 | 0.34 | 0.24 | 0.1 |
| OT44 | TCCATAGCCAAGAATGAG | 75 | 0.43 | 0.27 | 0.16 |
| OT45 | ACCATCTGTCAAGAATGAG | 76 | 0.26 | 0.21 | 0.05 |
| OT46 | GCCATCCCGCCAGGAATTAT | 77 | 0.08 | 0.07 | 0.01 |
| OT47 | ACCATCCTTCCAAGAAGATG | 78 | 0.14 | 0.12 | 0.02 |

[0307] GA459, GA460, and GA461 were similarly also assessed for off-target editing as shown in Tables 5, 6, and 7, respectively. While the on-target site, for each guide, shows high editing efficiency in the treated groups compared to the control groups, there is little to no off-target editing observed at candidate off-target sites.

TABLE 5
GA459 validation against 6 potential off-target
candidate sites in human primary hepatocytes

| | | SUM Editing % - | | | | |
|---|---|---|---|---|---|---|
| | | Human Primary Hepatocytes | | | | |
| GA459 | | Treat | Treat | Untreated | Untreated | Untreated |
| ID | Sequence (5′-3′) | rep 1 | rep 2 | rep 1 | rep 2 | rep 3 |
| On- | GCAACTTACCCAGAGGCAAA | 14.17 | 14.29 | 0.67 | 0.57 | 0.73 |
| target | (SEQ ID NO: 25) | | | | | |
| OT1 | ACAAATTACCCAGAGGAAAA | 1.19 | 1.25 | 1.31 | 1.28 | 1.27 |
| | (SEQ ID NO: 79) | | | | | |
| OT3 | TCAACTTACCCAGAGTCAAA | 0.98 | 0.82 | 0.63 | 0.68 | 0.8 |
| | (SEQ ID NO: 80) | | | | | |
| OT4 | GCAACTTGCCCAGAGGCACA | 0.92 | 1.07 | 0.87 | 0.99 | 0.79 |
| | (SEQ ID NO: 81) | | | | | |
| OT5 | GCAACATACCCAGTGGCAAA | 1.07 | 0.91 | 0.87 | 0.86 | 0.92 |
| | (SEQ ID NO: 82) | | | | | |
| OT6 | GCAGCCTACCCAGAGGCAAA | 1.02 | 1.1 | 0.97 | 1 | 1.05 |
| | (SEQ ID NO: 83) | | | | | |
| OT7 | GCAACTCCCCCAGAGGCAAA | 1.45 | 1.4 | 1.25 | 1.13 | 1.37 |
| | (SEQ ID NO: 84) | | | | | |

TABLE 6
GA460 validation against 3 potential off-target
candidate sites in human primary hepatocytes

| | | SUM Editing % - | | | | |
|---|---|---|---|---|---|---|
| | | Human Primary Hepatocytes | | | | |
| GA460 | | Treat | Treat | Untreated | Untreated | Untreated |
| ID | Sequence (5′-3′) | rep 1 | rep 2 | rep 1 | rep 2 | rep 3 |
| On- | TATAGGAAAACCAGTGAGTC | 76.4 | 74.3 | 1.54 | 1.17 | 1.41 |
| target | (SEQ ID NO: 26) | | | | | |
| OT1 | TAGAGGAAAACCAGTCAGTC | 1.44 | 1.6 | 1.51 | 1.35 | 1.61 |
| | (SEQ ID NO: 85) | | | | | |
| OT2 | CATAGGAAAACCAGTGAGTT | 5.67 | 6.6 | 1.18 | 0.98 | 1.24 |
| | (SEQ ID NO: 86) | | | | | |
| OT3 | TAAAGGAAAACCAGTGGGTC | 1.26 | 1.29 | 1.31 | 1.02 | 1.53 |
| | (SEQ ID NO: 87) | | | | | |

TABLE 7
GA461 validation against 4 potential off-target candidate
sites in human primary hepatocytes

| | | SUM Editing %- Human Primary Hepatocytes | | | | |
|---|---|---|---|---|---|---|
| | GA461 | Treat | Treat | Untreated | Untreated | Untreated |
| ID | Sequence (5'-3') | rep 1 | rep 2 | rep 1 | rep 2 | rep 3 |
| On- | TACTCACCTCTGCATGCTCA | ND | 58.9 | 0.39 | 0.37 | 0.35 |
| target | (SEQ ID NO: 27) | | | | | |
| OT1 | TACACAACTGTGCATGCTCA | 0.93 | 0.95 | 0.89 | 0.86 | 0.82 |
| | (SEQ ID NO: 88) | | | | | |
| OT2 | TATTCACCTCTGCATGCTCT | 0.17 | 0.18 | 0.23 | 0.16 | 0.2 |
| | (SEQ ID NO: 89) | | | | | |
| OT3 | TACTTACCTCTGCTTGCTCA | 0.28 | 0.35 | 0.28 | 0.23 | 0.34 |
| | (SEQ ID NO: 90) | | | | | |
| OT4 | TACACACCTCTACATGCTCA | 0.67 | 0.94 | 0.75 | 0.62 | ND |
| | (SEQ ID NO: 91) | | | | | |

[0308] Table 8 provides some results for off-target editing with the GA457 guide.

[0309] Table 9 provides some results for off-target editing with the GA460 guide.

[0310] Table 10 provides some results for off-target editing with the GA461 guide.

[0311] Results presented in Tables 4, 6, 7, 8, 9, and 10 are to be understood to be representative of results that may be achieved in accordance with the teachings provided herein. Compositions for editing a TTR gene according to the invention may produce total off-target editing activity that varies from the activity set forth in Table 4, 6, 7, 8, 9, or 10 or discussed regarding GA457, 460, or 461. For example, the compositions may produce total off-target editing activity that varies from the activity set forth in Table 4, 6, 7, 8, 9, or 10 or discussed regarding GA457, 460, or 461 by 10% or more, 20% or more, 30% or more, 40% or more, 50% or more, 60% or more, 70% or more, 80% or more, 90% or more, or 100% or more, for one or more off target site set forth in Table 4, 6, 7, 8, 9, or 10 or discussed regarding GA457, 460, or 461. In some embodiments, the compositions provide total off-target editing activity that is within 100%, within 90%, within 80%, with 70%, within 60%, within 50%, within 40%, within 30% or more, within 20% or more, or within 10% of the activity as set forth in Table 4, 6, 7, 8, 9, or 10 or discussed regarding GA457, 460, or 461 for one or more site set forth in Table 4, 6, 7, 8, 9, or 10 or discussed regarding GA457, 460, or 461. In some embodiments, the compositions produce off-target editing activity that is less than or equal to the activity set forth in Table 4, 6, 7, 8, 9, or 10 or discussed regarding GA457, 460, or 461 for one or more site set forth in Table 4, 6, 7, 8, 9, or 10 or discussed regarding GA457, 460, or 461. In some embodiments, the compositions produce no off-target editing activity for one or more site set forth in Table 4, 6, 7, 8, 9, or 10 or discussed regarding GA457, 460, or 461.

TABLE 8
Some GA457 Candidate Off-target Sites

| Chromo- | | | SEQ ID | |
|---|---|---|---|---|
| some | Location | Sequence (5′-3′) | NO: | Alignment |
| 1 | 214915487 | TGCATCCTGCCAAAAATGGGGAG | 92 | X50 |
| 2 | 162088240 | GCCATCTTGCCAAGAAAAAGGGG | 161 | X30 |
| 3 | 143033429 | AACATCCTGCAAGAATAAGAAG | 255 | RNA41 |
| 4 | 148246005 | GCCATCCAATAAGAATGAGTGG | 314 | RNA31 |
| 5 | 171975758 | GTCATCCTGCCAAAATAAGGAGG | 381 | X60 |
| 6 | 11558428 | CCCATACAGCCAAGAATGAGAAA | 443 | X50 |
| 7 | 136711066 | TCCATCCTACTAAGAATGAGGAG | 490 | X40 |
| 8 | 64649745 | ACCATCCTGACAAGTGTGAGGCA | 601 | X60 |
| 9 | 13461786 | GTGATCCTGCCAGGAATAAGGAG | 602 | X50 |
| 10 | 84701101 | GCCACCCTCCAAGGATCTGAGG | 682 | RNA41 |
| 11 | 36962784 | GCCATACTAACAAGAATGAGGTG | 683 | X40 |
| 12 | 18423002 | GCCATCCTCAAGAATGGGAAA | 774 | RNA32 |
| 13 | 109466404 | ACCATCCTGTCAAGAATCAAGAG | 775 | X50 |
| 14 | 43842189 | GCCAACCTGACAAATGTGAGG | 842 | RNA32 |
| 15 | 38417527 | ACCATCCTTCCAAGAAGATGGGG | 843 | X50 |
| 16 | 19426632 | GCCATCCAGCCAAGCAAGAAGGG | 890 | X40 |
| 17 | 42774058 | GTCATCACTGCCAAGAACAAGAGG | 891 | DNA31 |
| 18 | 6852692 | GCCATCCTGTAAGAATAAGGAT | 941 | RNA41 |
| 19 | 55221349 | ACCATCCTGCCAGCAATGTGAGG | 942 | X40 |
| 20 | 56309168 | TCCATCCTGAAGAATGAATAG | 986 | RNA32 |
| 21 | 40793316 | GCCATATCTGCCAAGAATGCGGAG | 987 | DNA31 |
| 22 | 34535097 | GATATCCTCACAAGAATGAGTGA | 1009 | X50 |
| X | 54383781 | GCTCTACTGCCAAGAAAGTGG | 1068 | RNA32 |
| Y | 6961334 | GCCATCCACCAAGAAAGCGGAG | 331 | RNA41 |

[0312] Additional examples of GA457 off-target sites are presented in U.S. Provisional Patent Application No. 63/322,182, filed Mar. 21, 2022. The GA457 off-target sites may include any one of SEQ ID NOS: 92-1073.

TABLE 9
Some GA460 Candidate Off-target Sites

| Chromosome | Location | Sequence | SEQ ID NO: | Alignment |
|---|---|---|---|---|
| 1 | 114689517 | TATAAGAAAACCAGTGTCTCTGG | 1074 | X30 |
| 2 | 165173430 | TATAGTGAACCAGTGAGGCAGG | 1280 | RNA31 |
| 3 | 56975861 | TGTAGAAAAACCAGTGAATAAGA | 1525 | X50 |
| 4 | 175627437 | GATAGGAAAACCATGAGGGGGT | 1892 | RNA41 |
| 5 | 115033087 | TATAGGAAACCAATGAGTGCTG | 1893 | RNA31 |
| 6 | 132497708 | TATAGGTAAACCAGAGTAGGC | 2232 | RNA32 |
| 7 | 40539970 | AGTAGGAAAACCAGTATATAGGG | 2233 | X60 |
| 8 | 77342779 | AATAGGAAAACCATTTTCAGG | 2494 | RNA32 |
| 9 | 73825991 | AATAGGAAAACCAGTAAAATAGG | 2495 | X50 |
| 10 | 112702031 | CATACGAAGTCCATGAGTCAGG | 2724 | RNA41 |
| 11 | 60264073 | ATATGGAAAACCAGAGAATCAGG | 2725 | X60 |
| 12 | 103497054 | GATAGAAACACCATGAATCAGG | 2957 | RNA41 |
| 13 | 31477698 | TATATGAAACCAGTAAGTTTGG | 2958 | RNA31 |
| 14 | 91758013 | TATAGGTGTAAACCAGTGTGCCTAG | 3137 | DNA42 |
| 15 | 28238271 | TATAGGAGAAACAGTGAATAGGA | 3138 | X50 |
| 16 | 74819495 | AAAATGTAAACCAGTAAGCCCGG | 3289 | X60 |
| 17 | 44943044 | TGTAGGAAGAACCAGTGGATCGGG | 3290 | DNA31 |
| 18 | 1915908 | AAAAGGAAAGCCAGTGACCTGG | 3410 | RNA41 |
| 19 | 44246762 | AAATAGAAAACCAGTAAGTCATG | 3411 | X60 |
| 20 | 24558049 | TATAGGAAAACAGGAACTCTGG | 3517 | RNA31 |
| 21 | 13185396 | TATAATAAAACCAGTGATAAGGG | 3518 | X50 |
| 22 | 38987774 | TGTAGGAAAACATATGATCAGG | 3574 | RNA41 |
| X | 134161037 | AATAGGATAACCAGTCAGTAGGG | 3575 | X40 |
| Y | 15254846 | TATAACATAACCAATAGGTCAGG | 3725 | X60 |

[0313] Additional examples of GA460 off-target sites are presented in U.S. Provisional Patent Application No. 63/322,182, filed Mar. 21, 2022. The GA460 off-target sites may include any one of SEQ ID NOS: 1074-3725.

TABLE 10
Some GA461 Candidate Off-target sites

| Chromosome | Location | Sequence (5′-3′) | SEQ ID NO: | Alignment |
|---|---|---|---|---|
| 1 | 110474222 | TACTCACCTCTACATGCTCAGTG | 3726 | X20 |
| 2 | 136311439 | TACAGCACCTCTGCATTGCCAGGG | 4071 | DNA41 |
| 3 | 159697502 | TATTCACCTCTGCATCTCCAGGG | 4072 | X40 |
| 4 | 3846305 | CTCTCACCTCTGCATGACAAGC | 4326 | RNA41 |
| 5 | 174698295 | TACTCACAATGCATGCTAAAGG | 4327 | RNA31 |
| 6 | 31933576 | TACTCACCTCTGCCTTCCTTTGT | 4551 | X60 |
| 7 | 53373361 | TTATCACCCTGCATGTTCAGGG | 4552 | RNA31 |
| 8 | 77161406 | TACTGACCTTTCCATCTCACTG | 4760 | RNA41 |
| 9 | 101247864 | TACTCACTCAGCATGTTCAGAG | 4761 | RNA31 |
| 10 | 4684859 | GAATAACCTCTGATGGTCAAGG | 4945 | RNA41 |
| 11 | 85210644 | TATTCACCTCTGCATGCTCTGAG | 4946 | X30 |
| 12 | 117261587 | TATTCAGCAATGCATGTCAAGG | 5116 | RNA41 |
| 13 | 94452599 | TACTTACCTTACATGTTCAAGG | 5117 | RNA31 |
| 14 | 64054638 | TACTCAACTCTGCTGCTATAGC | 5243 | RNA41 |
| 15 | 95108931 | TACTCAACTCTGCTGCTCTAGG | 4450 | RNA21 |
| 16 | 56094894 | TACTAACCTTGCCAGCTGAGGG | 5360 | RNA41 |
| 17 | 71161191 | TGCTCACCCCACATGCTCATGG | 5361 | RNA31 |
| 18 | 3284286 | TTTTCTACTCTGCATAATCATGG | 5473 | X60 |
| 19 | 45241812 | ACCTCACCTCTGCCTGCTCTGGG | 5474 | X40 |
| 20 | 13122061 | TACTCAACTGCATTCTCAGGG | 5580 | RNA22 |
| 21 | 45735600 | CACTCACACTACATGCTCTTGG | 5581 | RNA41 |
| 22 | 20392740 | TCCACACCTCTCGGCAAGCTGAGGG | 5645 | DNA42 |
| X | 39842774 | TATATACCTCTGCATGTTCAGAG | 5646 | X50 |
| Y | 20738820 | TAGACACATAAGCATGCTCACAG | 5741 | X60 |

[0314] Additional examples of GA461 off-target sites are presented in U.S. Provisional Patent Application No. 63/322,182, filed Mar. 21, 2022. The GA461 off-target sites may include any one of SEQ ID NOS: 3726-5745.

TABLE 11
ABE variant sequences
MA004 mRNA and protein sequences

| Region | Sequence | |
|---|---|---|
| Full | mRNA | Au′GAGCGAGGu′GGAGu′u′CAGCCACGAGu′ACu′GGAu′GCGGCACGCC |
| sequence | | Cu′GACCCu′GGCCAAGCGGGCCCGGGACGAGCGGGAGGu′GCCCGu′GG |
| | | GCGCCGu′GCu′GGu′GCu′GAACAACCGGGu′GAu′CGGCGAGGGCu′GGA |
| | | ACCGGGCCAu′CGGCCu′GCACGACCCCACCGCCCACGCCGAGAu′CAu′ |
| | | GGCCCu′GCGGCAGGGCGGCCu′GGu′GAu′GCAGAACu′ACCGGCu′GAu′ |
| | | CGACGCCACCCu′Gu′ACGu′GACCu′u′CGAGCCCu′GCGu′GAu′Gu′GCGCC |
| | | GGCGCCAu′GAu′CCACAGCCGGAu′CGGCCGGGu′GGu′Gu′u′CGGCGu′G |
| | | CGGAACGCCAAGACCGGCGCCGCCGGCAGCCu′GAu′GGACGu′GCu′GC |
| | | ACCACCCCGGCAu′GAACCACCGGGu′GGAGAu′CACCGAGGGCAu′CCu′ |
| | | GGCCGACGAGu′GCGCCGCCCu′GCu′Gu′GCCGGu′u′Cu′u′CCGGAu′GCCC |
| | | CGGCGGGu′Gu′u′CAACGCCCAGAAGAAGGCCCAGAGCAGCACCGACA |
| | | GGAAAu′AAGAGAGAAAAGAAGAGu′AAGAAGAAAu′Au′AAGAGCCAC |
| | | CAGCGGCGGCAGCAGCGGCGGCAGCAGCGGCAGCGAGACACCCGGC |
| | | ACCAGCGAGAGCGCCACCCCCGAGAGCAGCGGCGGCAGCAGCGGCG |
| | | GCAGCGACAAGAAGu′ACAGCAu′CGGCCu′GGCCAu′CGGCACCAACAG |
| | | CGu′GGGCu′GGGCCGu′GAu′CACCGACGAGu′ACAAGGu′GCCCAGCAA |
| | | GAAGu′u′CAAGGu′GCu′GGGCAACACCGACCGGCACAGCAu′CAAGAA |
| | | GAACCu′GAu′CGGCGCCCu′GCu′Gu′u′CGACAGCGGCGAGACAGCCGAG |
| | | GCCACCCGGCu′GAAGCGGACCGCCCGGCGGCGGu′ACACCCGGCGGA |
| | | AGAACCGGAu′Cu′GCu′ACCu′GCAGGAGAu′Cu′u′CAGCAACGAGAu′GG |
| | | CCAAGGu′GGACGACAGCu′u′Cu′u′CCACCGGCu′GGAGGAGAGCu′u′CCu |
| | | ′GGu′GGAGGAGGACAAGAAGCACGAGCGGCACCCCAu′Cu′u′CGGCAA |
| | | CAu′CGu′GGACGAGGu′GGCCu′ACCACGAGAAGu′ACCCCACCAu′Cu′AC |
| | | CACCu′GCGGAAGAAGCu′GGu′GGACAGCACCGACAAGGCCGACCu′GC |
| | | GGCu′GAu′Cu′ACCu′GGCCCu′GGCCCACAu′GAu′CAAGu′u′CCGGGGCC |
| | | ACu′u′CCu′GAu′CGAGGGCGACCu′GAACCCCGACAACAGCGACGu′GGA |
| | | CAAGCu′Gu′u′CAu′CCAGCu′GGu′GCAGACCu′ACAACCAGCu′Gu′u′CGA |
| | | GGAGAACCCCAu′CAACGCCAGCGGCGu′GGACGCCAAGGCCAu′CCu′G |
| | | AGCGCCCGGCu′GAGCAAGAGCCGGCGGCu′GGAGAACCu′GAu′CGCCC |
| | | AGCu′GCCCGGCGAGAAGAAGAACGGCCu′Gu′u′CGGCAACCu′GAu′CG |
| | | CCCu′GAGCCu′GGGCCu′GACCCCCAACu′u′CAAGAGCAACu′u′CGACCu′ |
| | | GGCCGAGGACGCCAAGCu′GCAGCu′GAGCAAGGACACCu′ACGACGAC |
| | | GACCu′GGACAACCu′GCu′GGCCCAGAu′CGGCGACCAGu′ACGCCGACC |
| | | u′Gu′u′CCu′GGCCGCCAAGAACCu′GAGCGACGCCAu′CCu′GCu′GAGCGA |
| | | CAu′CCu′GCGGGu′GAACACCGAGAu′CACCAAGGCCCCCCu′GAGCGCC |
| | | AGCAu′GAu′CAAGCGGu′ACGACGAGCACCACCAGGACCu′GACCCu′GC |
| | | u′GAAGGCCCu′GGu′GCGGCAGCAGCu′GCCCGAGAAGu′ACAAGGAGAu |
| | | ′Cu′u′Cu′u′CGACCAGAGCAAGAACGGCu′ACGCCGGCu′ACAu′CGACGG |
| | | CGGCGCCAGCCAGGAGGAGu′u′Cu′ACAAGu′u′CAu′CAAGCCCAu′CCu′ |
| | | GGAGAAGAu′GGACGGCACCGAGGAGCu′GCu′GGu′GAAGCu′GAACCG |
| | | GGAGGACCu′GCu′GCGGAAGCAGCGGACCu′u′CGACAACGGCAGCAu′ |
| | | CCCCCACCAGAu′CCACCu′GGGCGAGCu′GCACGCCAu′CCu′GCGGCGG |
| | | CAGGAGGACu′u′Cu′ACCCCu′u′CCu′GAAGGACAACCGGGAGAAGAu′C |
| | | GAGAAGAu′CCu′GACCu′u′CCGGAu′CCCCu′ACu′ACGu′GGGCCCCCu′GG |
| | | CCCGGGGCAACAGCCGGu′u′CGCCu′GGAu′GACCCGCAAGAGCGAGGA |
| | | GACAAu′CACCCCCu′GGAACu′u′CGAGGAGGu′GGu′GGACAAGGGCGC |
| | | CAGCGCCCAGAGCu′u′CAu′CGAGCGGAu′GACCAACu′u′CGACAAGAAC |
| | | Cu′GCCCAACGAGAAGGu′GCu′GCCCAAGCACAGCCu′GCu′Gu′ACGAGu |
| | | ′ACu′u′CACCGu′Gu′ACAACGAGCu′GACCAAGGu′GAAGu′ACGu′GACCG |
| | | AGGGCAu′GCGGAAGCCCGCCu′u′CCu′GAGCGGCGAGCAGAAGAAGG |
| | | CCAu′CGu′GGACCu′GCu′Gu′u′CAAGACCAACCGGAAGGu′GACCGu′GA |
| | | AGCAGCu′GAAGGAGGACu′ACu′u′CAAGAAGAu′CGAGu′GCu′u′CGACA |
| | | GCGu′GGAGAu′CAGCGGCGu′GGAGGACCGGu′u′CAACGCCAGCCu′GG |
| | | GCACCu′ACCACGACCu′GCu′GAAGAu′CAu′CAAGGACAAGGACu′u′CCu |
| | | ′GGACAACGAGGAGAACGAGGACAu′CCu′GGAGGACAu′CGu′GCu′GAC |
| | | CCu′GACCCu′Gu′u′CGAGGACCGGGAGAu′GAu′CGAGGAGCGGCu′GAA |
| | | GACCu′ACGCCCACCu′Gu′u′CGACGACAAGGu′GAu′GAAGCAGCu′GAA |
| | | GCGGCGGCGGu′ACACCGGCu′GGGGCCGGCu′GAGCCGGAAGCu′GAu′ |
| | | CAACGGCAu′CCGGGACAAGCAGAGCGGCAAGACCAu′CCu′GGACu′u′C |
| | | Cu′CAAGAGCGACGGCu′u′CGCCAACCGGAACu′u′CAu′GCAGCu′GAu′C |
| | | CACGACGACAGCCu′GACCu′u′CAAGGAGGACAu′CCAGAAGGCCCAGG |
| | | u′GAGCGGCCAGGGCGACAGCCu′GCACGAGCACAu′CGCCAACCu′GGC |
| | | CGGCAGCCCCGCCAu′CAAGAAGGGCAu′CCu′GCAGACCGu′GAAGGu′G |
| | | Gu′GGACGAGCu′GGu′GAAGGu′GAu′GGGCCGGCACAAGCCCGAGAAC |
| | | Au′CGu′GAu′CGAGAu′GGCCCGGGAGAACCAGACCACCCAGAAGGGCC |
| | | AGAAGAACAGCCGGGAGCGGAu′GAAGCGGAu′CGAGGAGGGCAu′CA |
| | | AGGAGCu′GGGCAGCCAGAu′CCu′GAAGGAGCACCCCGu′GGAGAACA |
| | | CCCAGCu′GCAGAACGAGAAGCu′Gu′ACCu′Gu′ACu′ACCu′GCAGAACG |
| | | GCCGGGACAu′Gu′ACGu′GGACCAGGAGCu′GGACAu′CAACCGGCu′GA |
| | | GCGACu′ACGACGu′GGACCACAu′CGu′GCCCCAGAGCu′u′CCu′GAAGG |
| | | ACGACAGCAu′CGACAACAAGGu′GCu′GACCCGGAGCGACAAGAACCG |
| | | GGGCAAGAGCGACAACGu′GCCCAGCGAGGAGGu′GGu′GAAGAAGAu′ |
| | | GAAGAACu′ACu′GGCGGCAGCu′GCu′GAACGCCAAGCu′GAu′CACCCA |
| | | GCGGAAGu′u′CGACAACCu′GACCAAGGCCGAGCGGGGCGGCCu′GAGC |
| | | GAGCu′GGACAAGGCCGGCu′u′CAu′CAAGCGGCAGCu′GGu′GGAGACA |
| | | CGGCAGAu′CACCAAGCACGu′GGCCCAGAu′CCu′GGACAGCCGGAu′GA |
| | | ACACCAAGu′ACGACGAGAACGACAAGCu′GAu′CCGGGAGGu′GAAGGu |
| | | ′GAu′CACCCu′CAAGAGCAAGCu′GGu′GAGCGACu′u′CCGGAAGGACu′u′ |
| | | CCAGu′u′Cu′ACAAGGu′GCGGGAGAu′CAACAACu′ACCACCACGCCCAC |
| | | GACGCCu′ACCu′GAACGCCGu′GGu′GGGCACCGCCCu′GAu′CAAGAAGu |
| | | ′ACCCCAAGCu′GGAGAGCGAGu′u′CGu′Gu′ACGGCGACu′ACAAGGu′Gu′ |
| | | ACGACGu′GCGGAAGAu′GAu′CGCCAAGAGCGAGCAGGAGAu′CGGCA |
| | | AGGCCACCGCCAAGu′ACu′u′Cu′u′Cu′ACAGCAACAu′CAu′GAACu′u′Cu′u |
| | | ′CAAGACCGAGAu′CACCCu′GGCCAACGGCGAGAu′CCGGAAGCGGCC |
| | | CCu′GAu′CGAGACAAACGGCGAGACAGGCGAGAu′CGu′Gu′GGGACAA |
| | | GGGCCGGGACu′u′CGCCACCGu′GCGGAAGGu′GCu′GAGCAu′GCCCCAG |
| | | Gu′GAACAu′CGu′GAAGAAGACCGAGGu′GCAGACCGGCGGCu′u′CAGC |
| | | AAGGAGAGCAu′CCu′GCCCAAGCGGAACAGCGACAAGCu′GAu′CGCCC |
| | | GGAAGAAGGACu′GGGACCCCAAGAAGu′ACGGCGGCu′u′CGACAGCC |
| | | CCACCGu′GGCCu′ACAGCGu′GCu′GGu′GGu′GGCCAAGGu′GGAGAAGG |
| | | GCAAGAGCAAGAAGCu′CAAGAGCGu′GAAGGAGCu′GCu′GGGCAu′CA |
| | | CCAu′CAu′GGAGCGGAGCAGCu′u′CGAGAAGAACCCCAu′CGACu′u′CCu |
| | | ′GGAGGCCAAGGGCu′ACAAGGAGGu′GAAGAAGGACCu′GAu′CAu′CAA |
| | | GCu′GCCCAAGu′ACAGCCu′Gu′u′CGAGCu′GGAGAACGGCCGGAAGCG |
| | | GAu′GCu′GGCCAGCGCCGGCGAGCu′GCAGAAGGGCAACGAGCu′GGCC |
| | | Cu′GCCCAGCAAGu′ACGu′GAACu′u′CCu′Gu′ACCu′GGCCAGCCACu′ACG |
| | | AGAAGCu′GAAGGGCAGCCCCGAGGACAACGAGCAGAAGCAGCu′Gu′u |
| | | ′CGu′GGAGCAGCACAAGCACu′ACCu′GGACGAGAu′CAu′CGAGCAGAu′ |
| | | CAGCGAGu′u′CAGCAAGCGGGu′GAu′CCu′GGCCGACGCCAACCu′GGAC |
| | | AAGGu′GCu′GAGCGCCu′ACAACAAGCACCGGGACAAGCCCAu′CCGGG |
| | | AGCAGGCCGAGAACAu′CAu′CCACCu′Gu′u′CACCCu′GACCAACCu′GGG |
| | | CGCCCCCGCCGCCu′u′CAAGu′ACu′u′CGACACCACCAu′CGACCGGAAG |
| | | CGGu′ACACCAGCACCAAGGAGGu′GCu′GGACGCCACCCu′GAu′CCACC |
| | | AGAGCAu′CACCGGCCu′Gu′ACGAGACACGGAu′CGACCu′GAGCCAGCu′ |
| | | GGGCGGCGACGAGGGCGCCGACAAGCGGACCGCCGACGGCAGCGAG |
| | | u′u′CGAGAGCCCCAAGAAGAAGCGGAAGGu′Gu′GAGCGGCCGCu′u′AA |
| | | u′u′AAGCu′GCCu′u′Cu′GCGGGGCu′u′GCCu′u′Cu′GGCCAu′GCCCu′u′Cu′u′ |
| | | Cu′Cu′CCCu′u′GCACCu′Gu′ACCu′Cu′u′GGu′Cu′u′u′GAAu′AAAGCCu′GAG |
| | | u′AGGAAGu′Cu′AGA (SEQ ID NO: 5746) |
| | protein | MSEVEFSHEYWMRHALTLAKRARDEREVPVGAVLVLNNRVIGEGWNR |
| | | AIGLHDPTAHAEIMALRQGGLVMQNYRLIDATLYVTFEPCVMCAGAMI |
| | | HSRIGRVVFGVRNAKTGAAGSLMDVLHHPGMNHRVEITEGILADECAA |
| | | LLCRFFRMPRRVFNAQKKAQSSTDSGGSSGGSSGSETPGTSESATPESSG |
| | | GSSGGSDKKYSIGLAIGTNSVGWAVITDEYKVPSKKFKVLGNTDRHSIKK |
| | | NLIGALLFDSGETAEATRLKRTARRRYTRRKNRICYLQEIFSNEMAKVDD |
| | | SFFHRLEESFLVEEDKKHERHPIFGNIVDEVAYHEKYPTIYHLRKKLVDST |
| | | DKADLRLIYLALAHMIKFRGHFLIEGDLNPDNSDVDKLFIQLVQTYNQLF |
| | | EENPINASGVDAKAILSARLSKSRRLENLIAQLPGEKKNGLFGNLIALSLG |
| | | LTPNFKSNFDLAEDAKLQLSKDTYDDDLDNLLAQIGDQYADLFLAAKNL |
| | | SDAILLSDILRVNTEITKAPLSASMIKRYDEHHQDLTLLKALVRQQLPEK |
| | | YKEIFFDQSKNGYAGYIDGGASQEEFYKFIKPILEKMDGTEELLVKLNRE |
| | | DLLRKQRTFDNGSIPHQIHLGELHAILRRQEDFYPFLKDNREKIEKILTFRI |
| | | PYYVGPLARGNSRFAWMTRKSEETITPWNFEEVVDKGASAQSFIERMTN |
| | | FDKNLPNEKVLPKHSLLYEYFTVYNELTKVKYVTEGMRKPAFLSGEQK |
| | | KAIVDLLFKTNRKVTVKQLKEDYFKKIECFDSVEISGVEDRFNASLGTYH |
| | | DLLKIIKDKDFLDNEENEDILEDIVLTLTLFEDREMIEERLKTYAHLFDDK |
| | | VMKQLKRRRYTGWGRLSRKLINGIRDKQSGKTILDFLKSDGFANRNFM |
| | | QLIHDDSLTFKEDIQKAQVSGQGDSLHEHIANLAGSPAIKKGILQTVKVV |
| | | DELVKVMGRHKPENIVIEMARENQTTQKGQKNSRERMKRIEEGIKELGS |
| | | QILKEHPVENTQLQNEKLYLYYLQNGRDMYVDQELDINRLSDYDVDHI |
| | | VPQSFLKDDSIDNKVLTRSDKNRGKSDNVPSEEVVKKMKNYWRQLLNA |
| | | KLITQRKFDNLTKAERGGLSELDKAGFIKRQLVETRQITKHVAQILDSRM |
| | | NTKYDENDKLIREVKVITLKSKLVSDFRKDFQFYKVREINNYHHAHDAY |
| | | LNAVVGTALIKKYPKLESEFVYGDYKVYDVRKMIAKSEQEIGKATAKYF |
| | | FYSNIMNFFKTEITLANGEIRKRPLIETNGETGEIVWDKGRDFATVRKVLS |
| | | MPQVNIVKKTEVQTGGFSKESILPKRNSDKLIARKKDWDPKKYGGFDSP |
| | | TVAYSVLVVAKVEKGKSKKLKSVKELLGITIMERSSFEKNPIDFLEAKGY |
| | | KEVKKDLIIKLPKYSLFELENGRKRMLASAGELQKGNELALPSKYVNFL |
| | | YLASHYEKLKGSPEDNEQKQLFVEQHKHYLDEIIEQISEFSKRVILADAN |
| | | LDKVLSAYNKHRDKPIREQAENIIHLFTLTNLGAPAAFKYFDTTIDRKRY |
| | | TSTKEVLDATLIHQSITGLYETRIDLSQLGGDEGADKRTADGSEFESPKK |
| | | KRKV (SEQ ID NO: 5747) |
| 5′ UTR | mRNA | AGGAAAu′AAGAGAGAAAAGAAGAGu′AAGAAGAAAu′Au′AAGAGCCA |
| | | CC (SEQ ID NO: 5748) |
| TadA | mRNA | Au′GAGCGAGGu′GGAGu′u′CAGCCACGAGu′ACu′GGAu′GCGGCACGCC |
| | | Cu′GACCCu′GGCCAAGCGGGCCCGGGACGAGCGGGAGGu′GCCCGu′GG |
| | | GCGCCGu′GCu′GGu′GCu′GAACAACCGGGu′GAu′CGGCGAGGGCu′GGA |
| | | ACCGGGCCAu′CGGCCu′GCACGACCCCACCGCCCACGCCGAGAu′CAu′ |
| | | GGCCCu′GCGGCAGGGCGGCCu′GGu′GAu′GCAGAACu′ACCGGCu′GAu′ |
| | | CGACGCCACCCu′Gu′ACGu′GACCu′u′CGAGCCCu′GCGu′GAu′Gu′GCGCC |
| | | GGCGCCAu′GAu′CCACAGCCGGAu′CGGCCGGGu′GGu′Gu′u′CGGCGu′G |
| | | CGGAACGCCAAGACCGGCGCCGCCGGCAGCCu′GAu′GGACGu′GCu′GC |
| | | ACCACCCCGGCAu′GAACCACCGGGu′GGAGAu′CACCGAGGGCAu′CCu′ |
| | | GGCCGACGAGu′GCGCCGCCCu′GCu′Gu′GCCGGu′u′Cu′u′CCGGAu′GCCC |
| | | CGGCGGGu′Gu′u′CAACGCCCAGAAGAAGGCCCAGAGCAGCACCGAC |
| | | (SEQ ID NO: 5749) |
| | protein | MSEVEFSHEYWMRHALTLAKRARDEREVPVGAVLVLNNRVIGEGWNR |
| | | AIGLHDPTAHAEIMALRQGGLVMQNYRLIDATLYVTFEPCVMCAGAMI |
| | | HSRIGRVVFGVRNAKTGAAGSLMDVLHHPGMNHRVEITEGILADECAA |
| | | LLCRFFRMPRRVFNAQKKAQSSTD (SEQ ID NO: 5750) |
| Linker | mRNA | AGCGGCGGCAGCAGCGGCGGCAGCAGCGGCAGCGAGACACCCGGCA |
| between | | CCAGCGAGAGCGCCACCCCCGAGAGCAGCGGCGGCAGCAGCGGCGG |
| TadA | | CAGC (SEQ ID NO: 5751) |
| and Cas9 | protein | SGGSSGGSSGSETPGTSESATPESSGGSSGGS (SEQ ID NO: 5752) |
| nickase | | |
| Cas9 | mRNA | GACAAGAAGu′ACAGCAu′CGGCCu′GGCCAu′CGGCACCAACAGCGu′G |
| nickase | | GGCu′GGGCCGu′GAu′CACCGACGAGu′ACAAGGu′GCCCAGCAAGAAGu |
| | | ′u′CAAGGu′GCu′GGGCAACACCGACCGGCACAGCAu′CAAGAAGAACC |
| | | u′GAu′CGGCGCCCu′GCu′Gu′u′CGACAGCGGCGAGACAGCCGAGGCCAC |
| | | CCGGCu′GAAGCGGACCGCCCGGCGGCGGu′ACACCCGGCGGAAGAAC |
| | | CGGAu′Cu′GCu′ACCu′GCAGGAGAu′Cu′u′CAGCAACGAGAu′GGCCAAG |
| | | Gu′GGACGACAGCu′u′Cu′u′CCACCGGCu′GGAGGAGAGCu′u′CCu′GGu′G |
| | | GAGGAGGACAAGAAGCACGAGCGGCACCCCAu′Cu′u′CGGCAACAu′CG |
| | | u′GGACGAGGu′GGCCu′ACCACGAGAAGu′ACCCCACCAu′Cu′ACCACCu′ |
| | | GCGGAAGAAGCu′GGu′GGACAGCACCGACAAGGCCGACCu′GCGGCu′ |
| | | GAu′Cu′ACCu′GGCCCu′GGCCCACAu′GAu′CAAGu′u′CCGGGGCCACu′u′C |
| | | Cu′GAu′CGAGGGCGACCu′GAACCCCGACAACAGCGACGu′GGACAAGC |
| | | u′Gu′u′CAu′CCAGCu′GGu′GCAGACCu′ACAACCAGCu′Gu′u′CGAGGAGA |
| | | ACCCCAu′CAACGCCAGCGGCGu′GGACGCCAAGGCCAu′CCu′GAGCGC |
| | | CCGGCu′GAGCAAGAGCCGGCGGCu′GGAGAACCu′GAu′CGCCCAGCu′G |
| | | CCCGGCGAGAAGAAGAACGGCCu′Gu′u′CGGCAACCu′GAu′CGCCCu′GA |
| | | GCCu′GGGCCu′GACCCCCAACu′u′CAAGAGCAACu′u′CGACCu′GGCCGA |
| | | GGACGCCAAGCu′GCAGCu′GAGCAAGGACACCu′ACGACGACGACCu′G |
| | | GACAACCu′GCu′GGCCCAGAu′CGGCGACCAGu′ACGCCGACCu′Gu′u′CC |
| | | u′GGCCGCCAAGAACCu′GAGCGACGCCAu′CCu′GCu′GAGCGACAu′CCu′ |
| | | GCGGGu′GAACACCGAGAu′CACCAAGGCCCCCCu′GAGCGCCAGCAu′G |
| | | Au′CAAGCGGu′ACGACGAGCACCACCAGGACCu′GACCCu′GCu′GAAGG |
| | | CCCu′GGu′GCGGCAGCAGCu′GCCCGAGAAGu′ACAAGGAGAu′Cu′u′Cu′u |
| | | ′CGACCAGAGCAAGAACGGCu′ACGCCGGCu′ACAu′CGACGGCGGCGC |
| | | CAGCCAGGAGGAGu′u′Cu′ACAAGu′u′CAu′CAAGCCCAu′CCu′GGAGAA |
| | | GAu′GGACGGCACCGAGGAGCu′GCu′GGu′GAAGCu′GAACCGGGAGGA |
| | | CCu′GCu′GCGGAAGCAGCGGACCu′u′CGACAACGGCAGCAu′CCCCCAC |
| | | CAGAu′CCACCu′GGGCGAGCu′GCACGCCAu′CCu′GCGGCGGCAGGAGG |
| | | ACu′u′Cu′ACCCCu′u′CCu′GAAGGACAACCGGGAGAAGAu′CGAGAAGAu |
| | | ′CCu′GACCu′u′CCGGAu′CCCCu′ACu′ACGu′GGGCCCCCu′GGCCCGGGGC |
| | | AACAGCCGGu′u′CGCCu′GGAu′GACCCGCAAGAGCGAGGAGACAAu′C |
| | | ACCCCCu′GGAACu′u′CGAGGAGGu′GGu′GGACAAGGGCGCCAGCGCCC |
| | | AGAGCu′u′CAu′CGAGCGGAu′GACCAACu′u′CGACAAGAACCu′GCCCA |
| | | ACGAGAAGGu′GCu′GCCCAAGCACAGCCu′GCu′Gu′ACGAGu′ACu′u′CA |
| | | CCGu′Gu′ACAACGAGCu′GACCAAGGu′GAAGu′ACGu′GACCGAGGGCAu |
| | | ′GCGGAAGCCCGCCu′u′CCu′GAGCGGCGAGCAGAAGAAGGCCAu′CGu′ |
| | | GGACCu′GCu′Gu′u′CAAGACCAACCGGAAGGu′GACCGu′GAAGCAGCu′ |
| | | GAAGGAGGACu′ACu′u′CAAGAAGAu′CGAGu′GCu′u′CGACAGCGu′GGA |
| | | GAu′CAGCGGCGu′GGAGGACCGGu′u′CAACGCCAGCCu′GGGCACCu′AC |
| | | CACGACCu′GCu′GAAGAu′CAu′CAAGGACAAGGACu′u′CCu′GGACAAC |
| | | GAGGAGAACGAGGACAu′CCu′GGAGGACAu′CGu′GCu′GACCCu′GACC |
| | | Cu′Gu′u′CGAGGACCGGGAGAu′GAu′CGAGGAGCGGCu′GAAGACCu′AC |
| | | GCCCACCu′Gu′u′CGACGACAAGGu′GAu′GAAGCAGCu′GAAGCGGCGG |
| | | CGGu′ACACCGGCu′GGGGCCGGCu′GAGCCGGAAGCu′GAu′CAACGGC |
| | | Au′CCGGGACAAGCAGAGCGGCAAGACCAu′CCu′GGACu′u′CCu′CAAG |
| | | AGCGACGGCu′u′CGCCAACCGGAACu′u′CAu′GCAGCu′GAu′CCACGAC |
| | | GACAGCCu′GACCu′u′CAAGGAGGACAu′CCAGAAGGCCCAGGu′GAGC |
| | | GGCCAGGGCGACAGCCu′GCACGAGCACAu′CGCCAACCu′GGCCGGCA |
| | | GCCCCGCCAu′CAAGAAGGGCAu′CCu′GCAGACCGu′GAAGGu′GGu′GG |
| | | ACGAGCu′GGu′GAAGGu′GAu′GGGCCGGCACAAGCCCGAGAACAu′CGu |
| | | ′GAu′CGAGAu′GGCCCGGGAGAACCAGACCACCCAGAAGGGCCAGAA |
| | | GAACAGCCGGGAGCGGAu′GAAGCGGAu′CGAGGAGGGCAu′CAAGGA |
| | | GCu′GGGCAGCCAGAu′CCu′GAAGGAGCACCCCGu′GGAGAACACCCAG |
| | | Cu′GCAGAACGAGAAGCu′Gu′ACCu′Gu′ACu′ACCu′GCAGAACGGCCGG |
| | | GACAu′Gu′ACGu′GGACCAGGAGCu′GGACAu′CAACCGGCu′GAGCGACu |
| | | ′ACGACGu′GGACCACAu′CGu′GCCCCAGAGCu′u′CCu′GAAGGACGACA |
| | | GCAu′CGACAACAAGGu′GCu′GACCCGGAGCGACAAGAACCGGGGCA |
| | | AGAGCGACAACGu′GCCCAGCGAGGAGGu′GGu′GAAGAAGAu′GAAGA |
| | | ACu′ACu′GGCGGCAGCu′GCu′GAACGCCAAGCu′GAu′CACCCAGCGGAA |
| | | Gu′u′CGACAACCu′GACCAAGGCCGAGCGGGGCGGCCu′GAGCGAGCu′ |
| | | GGACAAGGCCGGCu′u′CAu′CAAGCGGCAGCu′GGu′GGAGACACGGCA |
| | | GAu′CACCAAGCACGu′GGCCCAGAu′CCu′GGACAGCCGGAu′GAACACC |
| | | AAGu′ACGACGAGAACGACAAGCu′GAu′CCGGGAGGu′GAAGGu′GAu′C |
| | | ACCCu′CAAGAGCAAGCu′GGu′GAGCGACu′u′CCGGAAGGACu′u′CCAGu |
| | | ′u′Cu′ACAAGGu′GCGGGAGAu′CAACAACu′ACCACCACGCCCACGACG |
| | | CCu′ACCu′GAACGCCGu′GGu′GGGCACCGCCCu′GAu′CAAGAAGu′ACCC |
| | | CAAGCu′GGAGAGCGAGu′u′CGu′Gu′ACGGCGACu′ACAAGGu′Gu′ACGA |
| | | CGu′GCGGAAGAu′GAu′CGCCAAGAGCGAGCAGGAGAu′CGGCAAGGC |
| | | CACCGCCAAGu′ACu′u′Cu′u′Cu′ACAGCAACAu′CAu′GAACu′u′Cu′u′CAA |
| | | GACCGAGAu′CACCCu′GGCCAACGGCGAGAu′CCGGAAGCGGCCCCu′G |
| | | Au′CGAGACAAACGGCGAGACAGGCGAGAu′CGu′Gu′GGGACAAGGGC |
| | | CGGGACu′u′CGCCACCGu′GCGGAAGGu′GCu′GAGCAu′GCCCCAGGu′G |
| | | AACAu′CGu′GAAGAAGACCGAGGu′GCAGACCGGCGGCu′u′CAGCAAG |
| | | GAGAGCAu′CCu′GCCCAAGCGGAACAGCGACAAGCu′GAu′CGCCCGGA |
| | | AGAAGGACu′GGGACCCCAAGAAGu′ACGGCGGCu′u′CGACAGCCCCA |
| | | CCGu′GGCCu′ACAGCGu′GCu′GGu′GGu′GGCCAAGGu′GGAGAAGGGCA |
| | | AGAGCAAGAAGCu′CAAGAGCGu′GAAGGAGCu′GCu′GGGCAu′CACCA |
| | | u′CAu′GGAGCGGAGCAGCu′u′CGAGAAGAACCCCAu′CGACu′u′CCu′GG |
| | | AGGCCAAGGGCu′ACAAGGAGGu′GAAGAAGGACCu′GAu′CAu′CAAGC |
| | | u′GCCCAAGu′ACAGCCu′Gu′u′CGAGCu′GGAGAACGGCCGGAAGCGGAu |
| | | ′GCu′GGCCAGCGCCGGCGAGCu′GCAGAAGGGCAACGAGCu′GGCCCu′ |
| | | GCCCAGCAAGu′ACGu′GAACu′u′CCu′Gu′ACCu′GGCCAGCCACu′ACGAG |
| | | AAGCu′GAAGGGCAGCCCCGAGGACAACGAGCAGAAGCAGCu′Gu′u′C |
| | | Gu′GGAGCAGCACAAGCACu′ACCu′GGACGAGAu′CAu′CGAGCAGAu′C |
| | | AGCGAGu′u′CAGCAAGCGGGu′GAu′CCu′GGCCGACGCCAACCu′GGAC |
| | | AAGGu′GCu′GAGCGCCu′ACAACAAGCACCGGGACAAGCCCAu′CCGGG |
| | | AGCAGGCCGAGAACAu′CAu′CCACCu′Gu′u′CACCCu′GACCAACCu′GGG |
| | | CGCCCCCGCCGCCu′u′CAAGu′ACu′u′CGACACCACCAu′CGACCGGAAG |
| | | CGGu′ACACCAGCACCAAGGAGGu′GCu′GGACGCCACCCu′GAu′CCACC |
| | | AGAGCAu′CACCGGCCu′Gu′ACGAGACACGGAu′CGACCu′GAGCCAGCu′ |
| | | GGGCGGCGAC (SEQ ID NO: 5753) |
| | protein | DKKYSIGLAIGTNSVGWAVITDEYKVPSKKFKVLGNTDRHSIKKNLIGAL |
| | | LFDSGETAEATRLKRTARRRYTRRKNRICYLQEIFSNEMAKVDDSFFHRL |
| | | EESFLVEEDKKHERHPIFGNIVDEVAYHEKYPTIYHLRKKLVDSTDKADL |
| | | RLIYLALAHMIKFRGHFLIEGDLNPDNSDVDKLFIQLVQTYNQLFEENPIN |
| | | ASGVDAKAILSARLSKSRRLENLIAQLPGEKKNGLFGNLIALSLGLTPNFK |
| | | SNFDLAEDAKLQLSKDTYDDDLDNLLAQIGDQYADLFLAAKNLSDAILL |
| | | SDILRVNTEITKAPLSASMIKRYDEHHQDLTLLKALVRQQLPEKYKEIFFD |
| | | QSKNGYAGYIDGGASQEEFYKFIKPILEKMDGTEELLVKLNREDLLRKQ |
| | | RTFDNGSIPHQIHLGELHAILRRQEDFYPFLKDNREKIEKILTFRIPYYVGP |
| | | LARGNSRFAWMTRKSEETITPWNFEEVVDKGASAQSFIERMTNFDKNLP |
| | | NEKVLPKHSLLYEYFTVYNELTKVKYVTEGMRKPAFLSGEQKKAIVDLL |
| | | FKTNRKVTVKQLKEDYFKKIECFDSVEISGVEDRFNASLGTYHDLLKIIK |
| | | DKDFLDNEENEDILEDIVLTLTLFEDREMIEERLKTYAHLFDDKVMKQLK |
| | | RRRYTGWGRLSRKLINGIRDKQSGKTILDFLKSDGFANRNFMQLIHDDSL |
| | | TFKEDIQKAQVSGQGDSLHEHIANLAGSPAIKKGILQTVKVVDELVKVM |
| | | GRHKPENIVIEMARENQTTQKGQKNSRERMKRIEEGIKELGSQILKEHPV |
| | | ENTQLQNEKLYLYYLQNGRDMYVDQELDINRLSDYDVDHIVPQSFLKD |
| | | DSIDNKVLTRSDKNRGKSDNVPSEEVVKKMKNYWRQLLNAKLITQRKF |
| | | DNLTKAERGGLSELDKAGFIKRQLVETRQITKHVAQILDSRMNTKYDEN |
| | | DKLIREVKVITLKSKLVSDFRKDFQFYKVREINNYHHAHDAYLNAVVGT |
| | | ALIKKYPKLESEFVYGDYKVYDVRKMIAKSEQEIGKATAKYFFYSNIMN |
| | | FFKTEITLANGEIRKRPLIETNGETGEIVWDKGRDFATVRKVLSMPQVNI |
| | | VKKTEVQTGGFSKESILPKRNSDKLIARKKDWDPKKYGGFDSPTVAYSV |
| | | LVVAKVEKGKSKKLKSVKELLGITIMERSSFEKNPIDFLEAKGYKEVKKD |
| | | LIIKLPKYSLFELENGRKRMLASAGELQKGNELALPSKYVNFLYLASHYE |
| | | KLKGSPEDNEQKQLFVEQHKHYLDEIIEQISEFSKRVILADANLDKVLSA |
| | | YNKHRDKPIREQAENIIHLFTLTNLGAPAAFKYFDTTIDRKRYTSTKEVL |
| | | DATLIHQSITGLYETRIDLSQLGGD (SEQ ID NO: 5754) |
| Linker | mRNA | GAGGGCGCCGAC (SEQ ID NO: 5755) |
| between | | |
| Cas9 | | |
| nickase | Protein | EGAD (SEQ ID NO: 5756) |
| and NLS | | |
| Nuclear | mRNA | AAGCGGACCGCCGACGGCAGCGAGu′u′CGAGAGCCCCAAGAAGAAGC |
| locali- | | GGAAGGu′Gu′GA (SEQ ID NO: 5757) |
| zation | | |
| sequence | Protein | KRTADGSEFESPKKKRKV (SEQ ID NO: 5758) |
| (NLS) | | |
| 3′ UTR | mRNA | GCGGCCGCu′u′AAu′u′AAGCu′GCCu′u′Cu′GCGGGGCu′u′GCCu′u′Cu′GGC |
| | | CAu′GCCCu′u′Cu′u′Cu′Cu′CCCu′u′GCACCu′Gu′ACCu′Cu′u′GGu′Cu′u′u′GA |
| | | Au′AAAGCCu′GAGu′AGGAAGu′Cu′AGA (SEQ ID NO: 5759) |

The mutations at amino acid positions 691 and 1135 of the nCas9 component and their corresponding nucleotide sequences are indicated as bold and underlined.
u′: N¹-methylpseudouridine
The first nucleotide in the 5′ UTR has a 2′-O-methyl modification.

[0315] Other ABE variants may be employed to effect editing of human TTR gene. Examples of such ABE variants are described International Patent Application PCT/US21/26729, filed on Apr. 9, 2021, entitled BASE EDITING OF PCSK9 AND METHODS OF USING SAME FOR TREATMENT OF DISEASE, and naming Verve Therapeutics, Inc. as the applicant.

### Example 3

### In Vivo Non-Human Primate (NHP) Base Editing of TTR Gene

[0316] In this example, NHP surrogate sgRNAs (GA519 and GA520), corresponding to the human GA457 and GA460 sgRNAs described above, were prepared, and formulated with previously described ABE8.8 mRNA, encapsulated in lipid nanoparticles (LNPs), and intravenously dosed to NHPs. The study involved two distinct aspects.

[0317] The first aspect of the NHP in vivo study involved evaluating LNP1 and LNP2, which differed only in that LNP1 was formulated to encapsulate GA519 and ABE8.8 mRNA whereas LNP2 was formulated to encapsulate GA520 and ABE8.8 mRNA. The second aspect of the study involved formulating and evaluating a third LNP (LNP3). LNP3, like LNP1, was formulated to encapsulate GA519 and ABE8.8 mRNA. However, LNP 3 differed from LNP1 in that LNP3 included a GalNAc moiety constituent. In each aspect of the study, base editing efficiency, TTR protein expression, safety profiles, and pharmacokinetics were evaluated at multiple times post-infusion of the NHPs, as is further detailed below and illustrated in the accompanying figures.

Part A: In Vivo NHP Evaluation of GA519 and GA520 using non-GalNAc LNPs

### LNP Preparation

[0318] In this first aspect of the NHP study, two LNPs (LNP1 and LNP2) were formulated, with LNP1 encapsulating GA519 and ABE8.8 mRNA and LNP2 encapsulate GA520 and ABE8.8 mRNA. The constituents of each of the LNPs are comprised of an ionizable amino lipid (iLipid), a neutral helper lipid, a PEG-Lipid and a sterol lipid as described in and at the ratios indicated in Table 12 below.

TABLE 12
LNP1/LNP2 Components

| LNP | | | Mol |
|---|---|---|---|
| Component | Lipid names | Lipid structure | % |
| Amino lipid (iLipid) | 3-((4,4-bis(octyloxy)butanoyl)oxy)-2-((((3- (diethylamino)propoxy)carbonyl)oxy)methyl) propyl (9Z,12Z)-octadeca-9,12-dienoate* | [chemical structure] | 50 |
| Neutral helper lipid | 1,2-distearoyl-sn-glycero-3- phosphocholine (DSPC) | [chemical structure] | 9 |
| PEG-lipid | 1,2-dimyristoyl-rac-glycero-3- methoxypolyethylene glycol-2000 (PEG2000-DMG) | [chemical structure] | 3 |
| Sterol lipid | Cholesterol | [chemical structure] | 38 |

*described in International Published Patent Application WO 2021/178725 A1

[0319] It should be understood that the lipids in Table 12 may be substituted for other suitable lipids in the listed class. In some embodiments, for example, the LNP comprises the amino lipid VL422 described in the International published patent application WO 2022/060871 A1. For example, the amino lipid may be VL422, or a pharmaceutically acceptable salt or solvate thereof:

[chemical structure]

[0320] It should be further understood that the mol % of lipids in Table 12 may be adjusted and that the mol % included in Table 12 are targeted excipient percentages of the LNP, which is intended to represent the aggregate mol % of all the LNPs formulated in a given batch and that specific LNPs within a batch may have varying mol %. Thus, it is contemplated herein that the mol % of one or more, or all of the LNP components set forth in Table 12 may be adjusted, for example, by +/−1-5%, +/−5-10%, or +/−10%-20%. It is further contemplated herein that the mol % of one or more, or all of the LNP components set forth in Table 12 with respect to a specific LNP formulated in a given batch of LNPs formulated in accordance with desired target excipient percentages, may vary from the targeted mol %, for example, by +/−1-5%, +/−5-10%, or +/−10%-20%, or even greater than +/−20%. Further, it should be understood that additional LNP components, including non-lipid components, may be added to the LNP components set-forth in Table 12. As set forth in Table 13, LNP 1 was formulated with sgRNA GA519 and LNP2 was formulated with GA520, which correspond respectively to the sgRNA GA457 and GA460, previously described. GA519 and GA520 were chemically synthesized and the sequences and chemical modifications of GA519 and GA520 are specified in Table 13.

TABLE 13
GA519 and GA520 TTR Gene Targeted Guides

| | | | | Equivalent | |
|---|---|---|---|---|---|
| | gRNA | | Protospacer | Human | |
| LNP | ID | Species | (5′-3′) | gRNA | gRNA Sequence (5′-3′) |
| 1 | GA519 | Cyno | GCCATCCTGCC | GA457 | gscscsAUCCUGCCAAGAACGAG |
| | | | AAGAACGAG | | gUUUUAGagcuaGaaauagcaaGU |
| | | | (SEQ ID NO: 28) | | UaAaAuAaggcuaGUccGUUAucA |
| | | | | | AcuuGaaaaagugGcaccgagucggu |
| | | | | | gcuususus (SEQ ID NO: 16) |
| 2 | GA520 | Cyno | TATAGGAAAAC | GA460 | usasusAGGAAAACCAGUGAGU |
| | | | CAGTGAGTC | | CgUUUUAGagcuaGaaauagcaaG |
| | | | (SEQ ID NO: 26) | | UUaAaAuAaggcuaGUccGUUAu |
| | | | | | cAAcuuGaaaaagugGcaccgagucg |
| | | | | | gugcuususus (SEQ ID NO: 17) |

Letters in the sequences: A = adenosine; C = cytidine; G = guanosine; U = uridine; a = 2′—O—methyladenosine; c = 2′-O—methylcytidine; g = 2′—O—methylguanosine; u = 2′—O—methyluridine; s = phosphorothioate (PS) backbone linkage.
C = nucleotide that differs in NHP from human TTR sequence.
Bold type in gRNA sequence denotes spacer sequence corresponding to Protospacer.

[0321] Notably as compared to GA457, GA519 hybridizes between positions 50,681,581 to 50,681,603 in exon 1 of the reference cynomolgus monkey genome (macFas5) and edits the adenosine at position 50,681,584 resulting in disruption of the full length TTR protein sequence by converting a methionine to a threonine amino acid and prohibiting protein translation (FIG. 8). GA519 is the cynomolgus surrogate of the human GA457 gRNA and maps to the analogous region of the human TTR locus as in FIG. 4 as previously described. The cynomolgus GA519 gRNA differs from GA457 by a single nucleotide at position 17 of the protospacer and is highlighted with an underline in Protospacer column of Table 13. Furthermore, GA519 and GA457 differ from one another in that the tracr region of GA519 incorporates chemical modifications (detailed in Table 13). The chemical modifications are designed for, or capable of, improving in vivo stability.

[0322] Similarly, as compared to GA460, GA520 hybridizes between positions 50,678,305 to 50,678,327 of exon 3 of the reference cynomolgus monkey genome (macFas5) and edits the adenosine at position 50,678,324 resulting in splicing acceptor disruption producing a truncated non-functional TTR protein (FIG. 9). The protospacer region for GA520 is identical to the human GA460 and maps to the analogous region of the human TTR locus as in FIG. 4 as previously described. GA520 and GA460 differ in the tracr region and incorporate chemical modifications, as detailed in the table above, that are designed for, or capable of, improving in vivo stability.

[0323] For reference, the targeted nucleotide for base editing is highlighted in bold in FIGS. 8 and 9. FIGS. 8 and 9 also identify the location of the spacer of GA519 and GA520 relative to the TTR gene as previously described.

[0324] LNP 1 and LNP2 were formulated using ABE 8.8 mRNA and GA519 and GA520, respectively, with an sgRNA:mRNA weight ratio of 1:1. In other words, the LNPs were formulated with an equal amount by weight of guide RNA as mRNA. The resulting LNPs encapsulating the sgRNAs and ABE 8.8 mRNA were filtered using 0.2-micron filters and frozen at −80° C. Physical characteristics of the formulated LNPs are summarized in Table 14.

TABLE 14
LNP1/LNP2 Characterization

| LNP | Average LNP size (nm) | PDI | RNA entrapment (%) |
|---|---|---|---|
| 1 | 68.6 | 0.022 | 95.7 |
| 2 | 68.6 | 0.029 | 96.2 |

PDI is Polydispersity Index

One of ordinary skill in the art would understand that the average LNP size, PDI and RNA entrapment values set forth in Table 14 are subject to measurement error or accuracy. It is also contemplated herein that the LNP size, PDI and RNA entrapment values set forth in Table 14 may be varied by +/−1-5%, +/−5-10%, or +/−10%-20%.

### NHP Study Design

[0325] In this aspect of the study, female cynomolgus monkeys of Cambodian origin were used as study animals. A premedication regimen comprising dexamethasone and H1 and H2 antihistamines was administered to all animals on day −1 (approximately 24 hours prior to dosing) and day 1 (predose), at 30 to 60 minutes prior to test article dose administration. Three monkeys were dosed with LNP1 and 3 monkey were dosed with LNP 2 on day 1 of the study via a single IV infusion at a dose level of 3 mg of combined sgRNA and mRNA per kg of animal body weight and at a dose volume of 6 mL/kg (n=3/group).

[0326] Blood samples were collected from all animals predose for baseline measurement and post-dose at various time points on days 1 through 15 to assess biomarkers, cytokines, plasma iLipid and PEG-Lipid pharmacokinetics, and serum safety parameters.

[0327] Necropsies were performed on all animals at day 16. Liver biopsy samples were collected to assess TTR gene editing.

### Analysis of Editing Efficiency

[0328] The amount of gene editing in the liver was evaluated by next-generation sequencing (NGS) of targeted polymerase chain reaction (PCR) amplicons at the TTR target site derived from genomic DNA extracted from the liver of the animal using the method described previously (Musunuru et al, Nature 593, no. 7859 (May 2021): 429-34. https://doi.org/10.1038/s41586-021-03534-y). Percent editing was reported as the percent of all reads containing a nonreference allele at the target adenine.

[0329] FIG. 10 illustrates TTR editing efficiency of LNP1 as compared to LNP2. Notably, as illustrated in FIG. 10, the average hepatic TTR editing efficiency is higher in NHP treated with LNP1 (52%) compared to LNP2 (29%).

### Quantification of TTR Protein Expression in Serum

[0330] Serum was collected from all animals on days −10, −7, −5 pre-infusion and days 7, and 14 post LNP infusion for TTR protein analysis. Serum TTR was quantified using two methods. TTR protein levels were initially quantified using a custom TTR sandwich ELISA with the data obtained from that analysis presented in FIG. 11. Values for day −10, −7, and −5 were averaged to obtain the baseline value. Notably, LNP1 treated animals showed greater liver TTR editing, also showed greater plasma TTR reductions (−63% change from baseline on Day 14) when compared to LNP2 treated animals (3% change from baseline on Day 14). TTR protein collected from serum were also quantitated using liquid chromatography mass-spectrometry (LC-MS), in which four unique serum TTR peptide fragments were quantitated from each sample time point and the average of the results is reported. LC-MS serum TTR quantitation analysis using LC-MS is set forth in FIG. 12 and was notably consistent with the data obtained from the ELISA quantification in that it also demonstrated that LNP1 showed greater plasma TTR reductions (−73% change from baseline on day 14) when compared to LNP2 (−21% change from baseline on day 14).

[0331] Thus, as illustrated in FIGS. 10, 11 and 12, infusion of LNP1 and LNP2 in NHPs resulted in editing of the TTR gene in the liver, with LNP1 demonstrating greater editing than LNP2. The greater editing of LNP1 NHPs corresponded to a commensurate increase in the reduction in serum TTR concentrations in serum.

### Safety Analysis

[0332] Blood serum was collected from all animals at day −10, −7, −5 pre-infusion and 6, 24, 48, 96, 168, 240, and 336 hours post LNP infusion for safety analysis and specifically directed to observing changes in liver enzymes and cytokine levels. Serum chemistry parameters were directly measured from blood serum samples on a Beckman Coulter AU680 analyzer. Values for day −10, −7, and −5 were averaged to obtain the baseline value. Both LNP1 and LNP2 dosed animals showed transient alanine aminotransferase (FIG. 13A) elevations that peaked at 48 hours post end of infusion and returned to baseline levels 168 hours post end of infusion. Aspartate aminotransferase levels, illustrated in FIG. 13B, were also elevated by both LNP1 and LNP2 treatments, peaking at 6 hours post end of infusion and returning to baseline levels 96 hours post end of infusion. Serum lactate dehydrogenase concentrations, as illustrated in FIG. 14A, and glutamate dehydrogenase concentrations, as illustrated in FIG. 14B, were also found to be elevated shortly following administration of either LNP1 or LNP2 that returned to baseline levels 96-168 hours post end of infusion. Serum concentrations of gamma-glutamyl transferase, illustrated in FIG. 15A, and alkaline phosphatase, FIG. 15B, were not changed by either LNP1 or LNP2 infusion. In addition, LNP1 and LNP2 treatment did not affect serum total bilirubin concentrations, as illustrated in FIG. 16. LNP1 and LNP2 dosed animals, each also showed elevated serum creatine kinase concentrations, as illustrated in FIG. 17, which in each case peaked at 6 hours and returned fully to baseline levels by 168 hours post end of infusion.

[0333] Serum was collected from all animals at day −10, −7, −5 pre-treatment and 24, 168, and 336 hours post LNP infusion for serum cytokine analysis. Cytokines were measured using a multiplexed sandwich immunoassay, where four (MCP-1, IL-6, IP-10, IL-IRA) cytokines are quantitated simultaneously from serum samples using the U-PLEX Biomarker Group 1 (monkey) Assay from Meso Scale Diagnostics (Rockville, MD). Values for day −10, −7, and −5 were averaged to obtain the baseline value. Both LNP1 and LNP2 dosed animals showed elevated serum IL-6 concentrations, as illustrated in FIG. 18, to a similar extent, peaking at 6 hours and returning to baseline by 24 hours post end of infusion. As further illustrated in FIG. 18, both LNP1 and LNP2 dosed animals showed increased serum IL-IRA that peaked at 6 hours and returned fully to baseline by 336 hours. Also, as illustrated in FIG. 18, neither LNP1 nor LNP2 had any measurable significant effect on serum MCP-1 or IP-10 concentrations.

[0334] Overall, the analysis of foregoing parameters showed that infusion of either LNP1 and LNP2 in monkeys produced a transient increase in liver enzymes and cytokines that resolves rapidly.

### Pharmacokinetics (PK) Evaluation

[0335] Blood samples were obtained (K₂EDTA) for plasma PK analysis and determination of concentrations of the iLipid and PEGLipid excipients that comprised LNP1 and LNP2. After the end of the infusion, plasma samples were collected at 0.25, 2, 6, 24, 48, 96, 168, 240, and 336 hours post LNP infusion. Concentrations of the iLipid and PEG Lipids were measured using qualified LC-MS assays and are shown in FIG. 19A. Timepoints in which the lipids were below the limit of quantitation are not included in the figure. As illustrated in FIG. 19A, serum iLipid concentrations for LNP1 and LNP2 dosed animals continuously declined until approaching lower limit of quantitation (LLOQ) at 96 hour post LNP infusion. Similarly, as illustrated in FIG. 19B, serum PEG-Lipid concentrations for LNP1 and LNP2 dosed animals also rapidly declined reaching an LLOQ at 24 hours post end of infusion.

Part B: In Vivo NHP Evaluation of GA519 with GalNAc LNP

[0336] In further evaluation of GA519, an additional LNP (LNP3) was formulated to encapsulate the same GA519 and ABE8.8 mRNA at the 1:1 weight ratio and dosed intravenously to NHPs as previously described. LNP3 differs from LNP1 in that LNP3 was formulated with an additional GalNAc ligand excipient, as described in more detail below.

### LNP Preparation

[0337] The GalNAc LNPs (LNP3) formulated for this aspect of the study were comprised of the same iLipid, neutral helper lipid, PEG-Lipid and sterol lipid as described in connection with LNP1/LNP2, but unlike LNP1/LNP2, LNP3 also is comprised of a GalNAc conjugated lipid. The molar ratios of each constituent component of LNP3 are described in Table 15.

TABLE 15
LNP3 Components

| LNP | | | |
|---|---|---|---|
| Component | Lipid names | Lipid structure | Mol % |
| Amino lipid (iLipid) | 3-((4,4-bis(octyloxy)butanoyl)oxy)-2- ((((3- (diethylamino)propoxy)carbonyl) oxy)methyl)propyl (9Z,12Z)- octadeca-9,12-dienoate* | [chemical structure] | 50 |
| Neutral helper lipid | 1,2-distearoyl-sn-glycero-3- phosphocholine (DSPC) | [chemical structure] | 9 |
| PEG-lipid | 1,2-dimyristoyl-rac-glycero-3- methoxypolyethylene glycol-2000 (PEG₂₀₀₀-DMG) | [chemical structure] | 3 |
| Sterol lipid | Cholesterol | [chemical structure] | 37.95 |
| GalNAc- lipid | N²-(PEG-DSG)-N⁶-((C5-GalNAc)amido)- Lys-[bis((C5- GalNAc)propylamido)]amide or DSG-PEG-Lys-tris(GalNAc)* | [chemical structure] | 0.05 |

*described in International Published Patent Application WO 2021/178725 A1

[0338] It should be understood that the lipids in Table 15 may be substituted for other suitable lipids in the listed class. For example, the amino lipid may be the following amino lipid, or a salt thereof:

[chemical structure]

[0339] It should be further understood that the mol % of lipids in Table 13 may be adjusted and that the mol % included in Table 13 are targeted excipient percentages of the LNP, which is intended to represent the aggregate mol % of all the LNPs formulated in a given batch and that specific LNPs within a batch may have varying mol %. Thus, it is contemplated herein that the mol % of one or more, or all of the LNP components set forth in Table 13 may be adjusted, for example, by +/−1-5%, +/−5-10%, or +/−10%-20%. It is further contemplated herein that the mol % of one or more, or all of the LNP components set forth in Table 13 with respect to a specific LNP formulated in a given batch of LNPs formulated in accordance with desired target excipient percentages, may vary from the targeted mol %, for example, by +/−1-5%, +/−5-10%, or +/−10%-20%, or even greater than +/−20%. Further, it should be understood that additional LNP components, including non-lipid components, may be added to the LNP components set-forth in Table 13.

[0340] In formulating LNP3, the GalNAc-Lipid was premixed with other LNP excipients referenced in Table 15 prior to in-line mixing with GA519 sgRNA and ABE 8.8 mRNA (at 1:1 weight ratio) to form LNP3. Rajeev et al., WO2021178725, includes a description of the synthesis and characterization of the GalNAc lipid. As with LNP1/LNP2, the resulting GalNAc-LNPs, LNP3, were filtered using 0.2-micron filters and frozen at −80° C. The physical characteristics of the formulated LNP3 is summarized in Table 16.

TABLE 16
LNP3 Characterization.

| LNP | Average LNP size (nm) | PDI | RNA entrapment |
|---|---|---|---|
| 3 | 61.92 | 0.055 | 98.7 |

[0341] One of ordinary skill in the art would understand that the average LNP size, PDI and RNA entrapment values set forth in Table 16 are subject to measurement error or accuracy. It is also contemplated herein that the LNP size, PDI and RNA entrapment values set forth in Table 16 may be varied by +/−1-5%, +/−5-10%, or +/−10%-20%.

### NHP Study Design

[0342] Male cynomolgus monkeys of Cambodian origin were used in this aspect of the study. A premedication regimen comprising dexamethasone and H1 and H2 antihistamines were administered to all animals on day −1 (approximately 24 hours prior to dosing) and day 1 (predose), between 30 and 60 minutes before test article dose administration. The LNP3 dosing formulations were administered once on day 1 of the study by IV infusion of two groups of 3 monkeys at dose levels of (i) 2 mg of combined sgRNA and mRNA per kg of animal body weight and at a dose volume of 6 mL/kg (n=3/group) for the first group of three monkeys and (ii) 3 mg of combined sgRNA and mRNA per kg of animal body weight and at a dose volume of 6 mL/kg (n=3/group) for the second group of three monkeys.

[0343] Blood samples were collected from all animals predose for baseline measurement and post infusion at various time points from days 1 through 35 to assess biomarkers, plasma iLipid and PEG pharmacokinetics, and serum safety parameters.

[0344] Necropsies were performed on day 36. Liver tissue samples were collected from all animals to assess TTR gene editing in the liver.

### Analysis of Editing Efficiency

[0345] The amount of gene editing in the liver was evaluated by next-generation sequencing (NGS) of targeted polymerase chain reaction (PCR) amplicons at the TTR target site derived from genomic DNA extracted from the liver as described previously (Musunuru et al., Nature 593, no. 7859 (May 2021): 429-34. https://doi.org/10.1038/s41586-021-03534-y). Percent editing was reported as the percent of all reads containing a nonreference allele at the target adenine.

[0346] As set forth in FIG. 20, LNP3 led to similar levels of hepatic TTR editing efficiency at 2 mg/kg dosed monkeys (60%) as compared to 3 mg/kg dosed monkeys (63%).

### Quantification of TTR Protein Expression in Serum

[0347] Serum was collected at day −10, −7, −5 pre-infusion and 7, 14, 21, 28, and 35 days post end of infusion for TTR protein analysis. Serum TTR was initially quantified using a custom TTR sandwich ELISA with the data obtained from that analysis presented in FIG. 21. Values for day −10, −7, and −5 were averaged to obtain the baseline value. As illustrated in FIG. 21, both groups of LNP3 dosed animals showed marked reductions in serum TTR protein at the first timepoint (day 7) after dosing. These reductions were maintained for the duration of the study, reaching maximal reductions on day 28 of −84% and −91% change from baseline for the 2 mg/kg and 3 mg/kg monkey groups, respectively. To confirm the ELISA results, TTR protein was also quantitated by LC-MS, in which 4 unique TTR peptide fragments were quantitated in serum at each time point and the average of the 4 results is reported. LC-MS serum TTR quantitation, as illustrated in FIG. 22, confirmed that TTR was reduced at the first timepoint after infusion of the animals on day 7 and was maintained until necropsy on day 35. For the 2 mg/kg LNP3 dosed animals, maximal reduction of TTR protein was reached on day 35 (−82% change from baseline), while for the 3 mg/kg group maximal of TTR protein was reached on day 28 (−87% change from baseline).

[0348] Therefore, as described above and illustrated in the foregoing referenced figures, both the 2 mg/kg and 3 mg/kg LNP3 dosed NHPs resulted in marked relatively rapid liver TTR gene editing and corresponding reductions in serum TTR concentrations in protein.

### Safety Analysis

[0349] Blood serum was collected from each of the animals in the study at day −10, −7, −5 pre-infusion and 6, 24, 48, 96, 168, 336 hours, day 21, day 28, and day 35 post end of infusion for safety analysis and specifically directed at observing changes in liver enzymes and cytokine levels. Serum chemistry parameters were directly measured from blood serum samples on a Beckman Coulter AU680 analyzer. Values for day −10, −7, and −5 were averaged to obtain the baseline value. LNP3 dosed animals showed dose-dependent, transient alanine aminotransferase elevations as illustrated in FIG. 23A, which peaked at 24-48 hours post end of infusion and returned to baseline levels 336 hours post end of infusion. Aspartate aminotransferase levels, as illustrated in FIG. 23B, were elevated to a similar extent by both the 2 mg/kg and 3 mg/kg LNP3 doses, peaking at 6 hours post end of infusion and returning to baseline levels 168 hours post end of infusion. As illustrated in FIG. 24A, both the 2 mg/k and 3 mg/kg LNP3 doses elevated serum lactate dehydrogenase concentrations that returned to baseline levels by 168 hours post end of infusion. LNP3 also elevated glutamate dehydrogenase concentrations, as illustrated in FIG. 24B, in a dose-dependent manner, peaking at 24-hours, and returning to baseline levels 336 hours post end of infusion. Serum concentrations of gamma-glutamyl transferase and alkaline phosphatase, illustrated in FIGS. 258A and 25B, respectively, were not significantly changed by either LNP dose. In addition, LNP3 treatment did not significantly affect serum total bilirubin concentrations, as illustrated in FIG. 26. LNP3 elevated serum creatine kinase concentrations, as illustrated in FIG. 27, peaking at 6 hours post end of infusion then returning to baseline levels by 168 hours post end of infusion.

[0350] The analysis of the foregoing safety parameters in this aspect of the in vivo NHP study were consistent the prior aspect of the study in that they demonstrated that both doses of LNP3 produced a transient increase in liver enzymes that resolved rapidly within 2 weeks following dosing of the subjects.

### Pharmacokinetics (PK) Evaluation

[0351] Blood samples were obtained from all animals (K₂EDTA) for plasma PK analysis and determination of concentrations of the ionizable amino lipid (iLipid) and PEGLipid that comprised LNP3. After the end of the infusion, plasma samples were collected at 0.25, 2, 6, 24, 48, 96, 168, 240, and 336 hours post LNP3 infusion. Concentrations of iLipid and PEG-Lipid were measured using qualified LC-MS assays. Dose-dependent iLipid plasma exposure was observed, as illustrated in FIG. 28A, declining below the LLOQ by 96 hours post end of infusion. Dose dependent plasma exposure of PEG lipid was also observed, as illustrated in FIG. 28B, reaching the LLOQ by 24 hours post end of infusion.

[0352] The complete disclosure of all patents, patent applications, and publications, and electronically available material (including, for instance, nucleotide sequence submissions in, e.g., GenBank and RefSeq, and amino acid sequence submissions in, e.g., SwissProt, PIR, PRF, PDB, and translations from annotated coding regions in GenBank and RefSeq) cited herein are incorporated by reference. In the event that any inconsistency exists between the disclosure of the present application and the disclosure(s) of any document incorporated herein by reference, the disclosure of the present application shall govern. The foregoing detailed description and examples have been given for clarity of understanding only. No unnecessary limitations are to be understood therefrom. The invention is not limited to the exact details shown and described, for variations obvious to one skilled in the art will be included within the invention defined by the claims.

### Other Embodiments

[0353] From the foregoing description, it will be apparent that variations and modifications may be made to the disclosure described herein to adopt it to various usages and conditions. Such embodiments are also within the scope of the following claims.

[0354] The recitation of a listing of elements in any definition of a variable herein includes definitions of that variable as any single element or combination (or subcombination) of listed elements. The recitation of an embodiment herein includes that embodiment as any single embodiment, any portion of the embodiment, or in combination with any other embodiments or any portion thereof.

[0355] As is set forth herein, it will be appreciated that the disclosure comprises specific embodiments and examples of base editing systems to effect a nucleobase alteration in a gene and methods of using same for treatment of disease including compositions that comprise such base editing systems, designs and modifications thereto; and specific examples and embodiments describing the synthesis, manufacture, use, and efficacy of the foregoing individually and in combination including as pharmaceutical compositions for treating disease and for in vivo and in vitro delivery of active agents to mammalian cells under described conditions.

[0356] While specific examples and numerous embodiments have been provided to illustrate aspects and combinations of aspects of the foregoing, it should be appreciated and understood that any aspect, or combination thereof, of an exemplary or disclosed embodiment may be excluded therefrom to constitute another embodiment without limitation and that it is contemplated that any such embodiment can constitute a separate and independent claim. Similarly, it should be appreciated and understood that any aspect or combination of aspects of one or more embodiments may also be included or combined with any aspect or combination of aspects of one or more embodiments and that it is contemplated herein that all such combinations thereof fall within the scope of this disclosure and can be presented as separate and independent claims without limitation. Accordingly, it should be appreciated that any feature presented in one claim may be included in another claim; any feature presented in one claim may be removed from the claim to constitute a claim without that feature; and any feature presented in one claim may be combined with any feature in another claim, each of which is contemplated herein. The following enumerated clauses are further illustrative examples of aspects and combination of aspects of the foregoing embodiments and examples:

[0357] Following is an example of enumerated clauses:
[0358] 1. An isolated polynucleotide or a nucleic acid encoding same, the polynucleotide comprising a 5′-spacer sequence comprising about 17 to about 23 nucleotides that is homologous to a targeted protospacer sequence within a gene encoding Transthyretin (TTR) adjacent to a NGG protospacer-adjacent motif (PAM) sequence within the genome; the isolated polynucleotide serving as a guide polynucleotide to direct a base editor system to effect a nucleobase alteration in the TTR gene.
[0359] 2. The isolated polynucleotide or a nucleic acid encoding same of clause 1, further comprising a tracrRNA domain 3′ of the 5′spacer, wherein the tracrRNA is configured to bind a base editor protein.
[0360] 3. The isolated polynucleotide or a nucleic acid encoding same of clause 1 or 2, wherein the protospacer sequence comprises a start codon or a splice site of the TTR gene.
[0361] 4. The isolated polynucleotide or a nucleic acid encoding same of any one of the preceding clauses, wherein the nucleobase alteration effected in the TTR gene comprises disruption of a start codon or disruption of an intron exon splice site.
[0362] 5. The isolated polynucleotide or a nucleic acid encoding same of any one of the preceding clauses, wherein the nucleobase alteration effected in the TTR gene comprises disruption of an intron exon splice site.
[0363] 6. The isolated polynucleotide or a nucleic acid encoding same of any one of the preceding clauses, wherein the isolated polynucleotide or a polynucleotide encoded by the nucleic acid encoding same comprises a spacer sequence at least about 75%, at least about 80%, at least about 85%, at least about 90%, or at least about 95% identical to:

(GA457)
(SEQ ID NO: 1)
5′-GCCAUCCUGCCAAGAAUGAG-3′;
(GA519)
(SEQ ID NO: 2)
5′-GCCAUCCUGCCAAGAACGAG-3′;
(GA458)
(SEQ ID NO: 2)
5′-GCCAUCCUGCCAAGAACGAG-3′;
(GA459)
(SEQ ID NO: 3)
5′-GCAACUUACCCAGAGGCAAA-3′;
(GA460/GA520)
(SEQ ID NO: 4)
5′-UAUAGGAAAACCAGUGAGUC-3′;
or
(GA461)
(SEQ ID NO: 5)
5′-UACUCACCUCUGCAUGCUCA-3′

[0364] 7. The isolated polynucleotide or a nucleic acid encoding same of clause 6, wherein the isolated polynucleotide or a polynucleotide encoded by the nucleic acid encoding same comprises a spacer sequence having one of the following sequences:

(GA457)
(SEQ ID NO: 1)
5′-GCCAUCCUGCCAAGAAUGAG-3′;
(GA519)
(SEQ ID NO: 2)
5′-GCCAUCCUGCCAAGAACGAG-3′;
(GA458)
(SEQ ID NO: 2)
5′-GCCAUCCUGCCAAGAACGAG-3′;
(GA459)
(SEQ ID NO: 3)
5′-GCAACUUACCCAGAGGCAAA-3′;
(GA460/GA520)
(SEQ ID NO: 4)
5′-UAUAGGAAAACCAGUGAGUC-3′;
or
(GA461)
(SEQ ID NO: 5)
5′-UACUCACCUCUGCAUGCUCA-3′.

[0365] 8. The isolated polynucleotide or a nucleic acid encoding same of any one of the preceding clauses, wherein the isolated polynucleotide or a polynucleotide encoded by the nucleic acid encoding same comprises a guide RNA.
[0366] 9. A composition comprising the isolated polynucleotide or a nucleic acid encoding same of any one of the preceding clauses.
[0367] 10. A composition comprising the isolated polynucleotide or a nucleic acid encoding same of any one of the preceding clauses and a nucleic acid encoding a base editor fusion protein.
[0368] 11. The composition of clause 10, wherein the base editor fusion protein comprises a programmable DNA binding domain and a deaminase.
[0369] 12. The composition of clause 11, wherein the deaminase comprises a cytosine deaminase or an adenine deaminase.
[0370] 13. The composition of any one of clauses 10 to 12, wherein the programmable DNA binding domain comprises a catalytically impaired Cas9 protein.
[0371] 14. The composition of clause 13, wherein the catalytically impaired Cas9 protein comprises a catalytically impaired Streptococcus pyogenes Cas9 protein.
[0372] 15. The composition of any one of clauses 11 to 14, wherein the deaminase comprises ABE8.8.
[0373] 16. The composition of any one of clauses 11 to 14, wherein the deaminase is encoded by mRNA comprising the MA004 mRNA sequence in Table 11.
[0374] 17. The composition of any one of clauses 11 to 14, wherein the deaminase is encoded by mRNA comprising a sequence having 95% or greater sequence identity to the MA004 mRNA as shown in Table 11.
[0375] 18. The composition of any one of clauses 11 to 14, wherein the deaminase is encoded by mRNA comprising a sequence having 96% or greater sequence identity to the MA004 mRNA as shown in Table 11.
[0376] 19. The composition of any one of clauses 11 to 14, wherein the deaminase is encoded by mRNA comprising a sequence having 97% or greater sequence identity to the MA004 mRNA as shown in Table 11.
[0377] 20. The composition of any one of clauses 11 to 14, wherein the deaminase is encoded by mRNA comprising a sequence having 98% or greater sequence identity to the MA004 mRNA as shown in Table 11.
[0378] 21. The composition of any one of clauses 11 to 14, wherein the deaminase is encoded by mRNA comprising a sequence having 99% or greater sequence identity to the MA004 mRNA as shown in Table 11.
[0379] 22. A pharmaceutical composition comprising the isolated polynucleotide or a nucleic acid encoding same of any one of clauses 1 to 8 or the composition of any one of clauses 9 to 21.
[0380] 23. A lipid nanoparticle (LNP) comprising the isolated polynucleotide or a nucleic acid encoding same of any one of claims 1 to 8, the composition of any one of clauses 9 to 21, or the pharmaceutical composition of clause 22.
[0381] 24. The LNP of clause 23, comprising an amino lipid having the following structure, or a pharmaceutically acceptable salt or solvate thereof:

[chemical structure]

[0382] 25. The LNP of clause 23, comprising an amino lipid having the following structure, or a pharmaceutically acceptable salt or pharmaceutically acceptable solvate thereof:

[chemical structure]

[0383] 26. The LNP of clause 24 or 25, further comprising a neutral helper lipid, a PEG-lipid, and a sterol lipid.
[0384] 27. The LNP of clause 24 or 25, comprising the components listed in Table 12.
[0385] 28. The LNP of clause 27, wherein the components listed in Table 12 are present in the LNP at a mole percent (Mol %) within 10% to 20% of the Mol % listed in Table 12.
[0386] 29. The LNP of clause 27, wherein the components listed in Table 12 are present in the LNP at a mole percent (Mol %) within 5% to 10% of the Mol % listed in Table 12.
[0387] 30. The LNP of clause 27, wherein the components listed in Table 12 are present in the LNP at a mole percent (Mol %) within 1% to 5% of the Mol % listed in Table 12.
[0388] 31. The LNP of clause 27, wherein the components listed in Table 12 are present in the LNP at a mole percent (Mol %) listed in Table 12.
[0389] 32. The LNP of any one of clauses 27 to 31, wherein the LNP comprises a receptor targeting conjugate comprising a compound of formula (V):

[chemical structure]

[0390] wherein,
[0391] a plurality of the A is N-acetylgalactosamine (GalNAc) or

[chemical structure]

or a derivative thereof;
[0392] each L¹, L², L³, L⁴, L⁵, L⁶, L⁷, L⁸, L⁹, L¹⁰ and L¹² is independently substituted or unsubstituted C₁-C₁₂ alkylene, substituted or unsubstituted C₁-C₁₂ heteroalkylene, substituted or unsubstituted C₂-C₁₂ alkenylene, substituted or unsubstituted C₂-C₁₂ alkynylene, —(CH₂CH₂O)ₘ—, —(OCH₂CH₂)ₘ—, —O—, —S—, —S(═O)—, —S(═O)₂—, —S(═O)(═NR¹)—, —C(═O)—, —C(═N—OR¹)—, —C(═O)O—, —OC(═O)—, —C(═O)C(═O)—, —C(═O)NR¹—, —NR¹C(═O)—, —OC(═O)NR¹—, —NR¹C(═O)O—, —NR¹C(═O)NR¹—, —C(═O)NR¹C(═O)—, —S(═O)₂NR¹—, —NR¹S(═O)₂—, —NR¹—, or —N(OR¹)—;
[0393] L¹¹ is substituted or unsubstituted —(CH₂CH₂O)ₙ—, substituted or unsubstituted —(OCH₂CH₂)ₙ— or substituted or unsubstituted —(CH₂)ₙ—;
[0394] each R¹ is independently H or substituted or unsubstituted C₁-C₆alkyl;
[0395] R is a lipid;
[0396] m is an integer selected from 1 to 10; and
[0397] n is an integer selected from 1 to 200.
[0398] 33. A pharmaceutical composition comprising the LNP of any one of clauses 23-32.
[0399] 34. A method of effecting one or more nucleobase alterations in a TTR gene in a cell, the method comprising contacting the cell with the polynucleotide or nucleic acid of any one of clauses 1 to 8, the composition of any one of clauses 9 to 21, the pharmaceutical composition of claim 22 or 33, or the LNP of any one of clauses 23 to 32.
[0400] 35. The method clause 34, wherein one or more alleles of the TTR gene is silenced.
[0401] 36. A method of effecting one or more nucleobase alterations in a Transthyretin (TTR) gene in a subject, the method comprising administering the polynucleotide or nucleic acid of any one of clauses 1 to 8, the composition of any one of clauses 9 to 21, the pharmaceutical composition of clause 22 or 33, or the lipid nanoparticles of any one of clauses 23 to 32 to the subject.
[0402] 37. The method of clause 36, wherein the base alteration occurs in 25% or more of whole liver cells in the subject when measured by next generation sequencing.
[0403] 38. The method of clause 36, wherein the base alteration occurs in 40% or more of whole liver cells in the subject when measured by next generation sequencing.
[0404] 39. The method of clause 36, wherein the base alteration occurs in 50% or more of whole liver cells in the subject when measured by next generation sequencing.
[0405] 40. The method of any one of clauses 36 to 39, wherein the base alteration results in reduced serum TTR levels.
[0406] 41. The method of any one of clauses 36 to 40, wherein one or more alleles of the TTR gene is silenced.
[0407] 42. The method of any one of clauses 36 to 41, wherein the subject is a non-human primate.
[0408] 43. The method of any one of clauses 36 to 41, wherein the subject is a human.
[0409] 44. The method of clause 43, wherein the subject to which the polynucleotide or nucleic acid, the composition, the pharmaceutical composition, or the LNP is administered is a subject in need thereof.
[0410] 45. The method of clause 44, wherein administering the polynucleotide or nucleic acid, the composition, the pharmaceutical composition, or the LNP comprises administering a therapeutically effective amount of the polynucleotide, the composition, the pharmaceutical composition, or the LNP.
[0411] 46. The method of clause 45, wherein the subject suffers from, or is at risk of, hereditary transthyretin amyloidosis (hATTR) due to one or more mutations in the TTR gene.
[0412] 47. The method of clause 46, wherein the subject suffers from, or at risk of, cardiomyopathy (hATTR-CM) and/or polyneuropathy (hATTR-PN).
[0413] 48. The method of clause 45, wherein the subject suffers from, or is at risk of, senile cardiac amyloidosis characterized by wild-type alleles of the TTR gene (ATTRwt).
[0414] 49. The method of any one of clauses 36 to 48, wherein the polynucleotide or nucleic acid, the composition, the pharmaceutical composition, or the LNP is administered intravenously.
[0415] 50. A composition for editing a TTR gene comprising:
   [0416] (a) a mRNA encoding a base editor protein having an editing window; and
   [0417] (b) a guide RNA comprising a tracr sequence that serves as a binding scaffold for the base editor protein and a spacer sequence that serves to guide the base editor protein to a protospacer sequence on the TTR gene;
   [0418] wherein the spacer sequence is complimentary, at least in part, to a splice site or a start codon of the TTR gene.
[0419] 51. The composition of clause 50, wherein the base editor protein comprises a cytidine deaminase or an adenosine deaminase.
[0420] 52. The composition of clause 50, wherein the base editor protein comprises a fusion protein comprising a nickase and a cytidine deaminase or an adenosine deaminase.
[0421] 53. The composition of clause 50, wherein the base editor protein comprises a fusion protein comprising a D10A nickase Cas9 and a cytidine deaminase or an adenosine deaminase.
[0422] 54. The composition of any one of clause 51 to 53, wherein the wherein the cytidine deaminase is a deoxycytidine deaminase.
[0423] 55. The composition of any one of clause 51 to 53, wherein the wherein the adenosine deaminase is a deoxyadenosine deaminase.
[0424] 56. The composition of clause 50, wherein the base editor protein comprises a fusion protein comprising Adenine base editor ABE8.8.
[0425] 57. The composition of any one of clauses 60 to 56, wherein the spacer sequence is homologous to a protospacer sequence selected from Table 1.
[0426] 58. The composition of any one of clauses 50 to 56, wherein the spacer sequence is selected from the following table:

gRNA spacer sequence (5′-3′)

gscscsAUCCUGCCAAGAAUGAG (SEQ ID NO: 6)
gscscsAUCCUGCCAAGAACGAG (SEQ ID NO: 7)
gscsasACUUACCCAGAGGCAAA (SEQ ID NO: 8)
usasusAGGAAAACCAGUGAGUC (SEQ ID NO: 9)
usascsUCACCUCUGCAUGCUCA (SEQ ID NO: 10)
gscscsAUCCUGCCAAGAACGAG (SEQ ID NO: 7)

[0427] wherein: A is adenosine; C is cytidine; G is guanosine; U is uridine; a is 2′-O— methyladenosine; c is 2′-O-methylcytidine; g is 2′-O-methylguanosine; u is 2′-O— methyluridine and s is phosphorothioate (PS) backbone linkage.
[0428] 59. The composition of any one of clauses 50 to 56, wherein the spacer sequence has greater than 80% sequence identity to a spacer sequence presented in the following table:

gRNA spacer sequence (5′-3′)

GCCAUCCUGCCAAGAAUGAG (SEQ ID NO: 1)
GCCAUCCUGCCAAGAACGAG (SEQ ID NO: 2)
GCAACUUACCCAGAGGCAAA (SEQ ID NO: 3)
UAUAGGAAAACCAGUGAGUC (SEQ ID NO: 4)
UACUCACCUCUGCAUGCUCA (SEQ ID NO: 5)
GCCAUCCUGCCAAGAACGAG (SEQ ID NO: 2)

[0429] wherein A is a modified or unmodified adenosine; C is a modified or unmodified cytidine; G is modified or unmodified guanosine; and U is a modified or unmodified uridine.
[0430] 60. The composition of any one of clauses 50 to 56, wherein the guide RNA is selected from the following table:

Guide RNA sequence (5′-3′)

gscscsAUCCUGCCAAGAAUGAGGUUUUAGAGCUAGAAAUAGCAAGUUAA
AAUAAGGCUAGUCCGUUAUCAACUUGAAAAAGUGGCACCGAGUCGGUGCU
sususu (SEQ ID NO: 11)
AUCCUGCCAAGAACGAGGUUUUAGAGCUAGAAAUAGCAAGUUAAAAUAAG
GCUAGUCCGUUAUCAACUUGAAAAAGUGGCACCGAGUCGGUGCUsususu
(SEQ ID NO: 12)
gscsasACUUACCCAGAGGCAAAGUUUUAGAGCUAGAAAUAGCAAGUUAA
AAUAAGGCUAGUCCGUUAUCAACUUGAAAAAGUGGCACCGAGUCGGUGCU
sususu (SEQ ID NO: 13)
usasusAGGAAAACCAGUGAGUCGUUUUAGAGCUAGAAAUAGCAAGUUAA
AAUAAGGCUAGUCCGUUAUCAACUUGAAAAAGUGGCACCGAGUCGGUGCU
sususu (SEQ ID NO: 14)
usascsUCACCUCUGCAUGCUCAGUUUUAGAGCUAGAAAUAGCAAGUUAA
AAUAAGGCUAGUCCGUUAUCAACUUGAAAAAGUGGCACCGAGUCGGUGCU
sususu (SEQ ID NO: 15)
gscscsAUCCUGCCAAGAACGAGgUUUUAGagcuaGaaauagcaaGUUaA
aAuAaggcuaGUccGUUAucAAcuuGaaaaagugGcaccgagucggugcu
ususus (SEQ ID NO: 16)
usasusAGGAAAACCAGUGAGUCgUUUUAGagcuaGaaauagcaaGUUaA
aAuAaggcuaGUccGUUAucAAcuuGaaaaagugGcaccgagucggugcu
ususus(SEQ ID NO: 17)

[0431] wherein A is adenosine; C is cytidine; G is guanosine; U is uridine; a is 2′-O— methyladenosine; c is 2′-O-methylcytidine; g is 2′-O-methylguanosine; u is 2′-O— methyluridine and s is phosphorothioate (PS) backbone linkage and wherein bold type represents the spacer sequence.
[0432] 61. The composition of any one of clauses 50 to 60, wherein the spacer sequence has greater than 80% sequence identity to guide RNA sequences selected from the following table:

gRNA sequence (5′-3′)

GCCAUCCUGCCAAGAAUGAGGUUUUAGAGCUAGAAAUAGCAAGUUAAAAU
AAGGCUAGUCCGUUAUCAACUUGAAAAAGUGGCACCGAGUCGGUGCUUUU
(SEQ ID NO: 18)
GCCAUCCUGCCAAGAACGAGGUUUUAGAGCUAGAAAUAGCAAGUUAAAAU
AAGGCUAGUCCGUUAUCAACUUGAAAAAGUGGCACCGAGUCGGUGCUUUU
(SEQ ID NO: 19)
GCAACUUACCCAGAGGCAAAGUUUUAGAGCUAGAAAUAGCAAGUUAAAAU
AAGGCUAGUCCGUUAUCAACUUGAAAAAGUGGCACCGAGUCGGUGCUUUU
(SEQ ID NO: 20)
UAUAGGAAAACCAGUGAGUCGUUUUAGAGCUAGAAAUAGCAAGUUAAAAU
AAGGCUAGUCCGUUAUCAACUUGAAAAAGUGGCACCGAGUCGGUGCUUUU
(SEQ ID NO: 21)
UACUCACCUCUGCAUGCUCAGUUUUAGAGCUAGAAAUAGCAAGUUAAAAU
AAGGCUAGUCCGUUAUCAACUUGAAAAAGUGGCACCGAGUCGGUGCUUUU
(SEQ ID NO: 22)
GCCAUCCUGCCAAGAACGAGGUUUUAGAGCUAGAAAUAGCAAGUUAAAAU
AAGGCUAGUCCGUUAUCAACUUGAAAAAGUGGCACCGAGUCGGUGCUUUU
(SEQ ID NO: 19)

[0433] 62. The composition of any one of clauses 50 to 61, wherein the composition is capable of producing editing activity that is within 50% of the editing activity set forth in Table 2, excluding GA459 therefrom, or is capable of producing editing activity that is within 50% of the editing activity set forth in Table 3.
[0434] 63. The composition of any one of clauses 50 to 62, wherein the composition is capable of producing within 50% to the total off-target editing activity, or less than or equal to the observed off-target editing activity, or no off-target editing activity at one or more potential off target site set forth in Tables 4, 6, 7, 8, 9, or 10.
[0435] 64. The composition of any one of clauses 50 to 63, wherein the composition is encapsulated within a lipid nanoparticle.
[0436] 65. The composition of any one of clauses 50 to 64, wherein the composition is administered in vivo to a subject.

[0437] It will also be appreciated from reviewing the present disclosure, that it is contemplated that the one or more aspects or features presented in one of or a group of related clauses may also be included in other clauses or in combination with the one or more aspects or features in other clauses

What is claimed is:

1. An isolated polynucleotide or a nucleic acid encoding same, the polynucleotide comprising a 5′-spacer sequence comprising about 17 to about 23 nucleotides that is homologous to a targeted protospacer sequence within a gene encoding Transthyretin (TTR) adjacent to a NGG protospacer-adjacent motif (PAM) sequence within the genome;
the isolated polynucleotide serving as a guide polynucleotide to direct a base editor system to effect a nucleobase alteration in the TTR gene.

2. The isolated polynucleotide or a nucleic acid encoding same of claim 1, wherein the protospacer sequence comprises a start codon or a splice site of the TTR gene.

3. The isolated polynucleotide or a nucleic acid encoding same of claim 1, wherein the nucleobase alteration effected in the TTR gene comprises disruption of a start codon or disruption of an intron exon splice site.

4. The isolated polynucleotide or a nucleic acid encoding same of claim 1, wherein the isolated polynucleotide or a polynucleotide encoded by the nucleic acid encoding same comprises one of the following spacers or a spacer sequence at least about 75%, at least about 80%, at least about 85%, at least about 90%, or at least about 95% identical to:
(GA457)
(SEQ ID NO: 1)
5′-GCCAUCCUGCCAAGAAUGAG-3′;
(GA519)
(SEQ ID NO: 2)
5′-GCCAUCCUGCCAAGAACGAG-3′;
(GA458)
(SEQ ID NO: 2)
5′-GCCAUCCUGCCAAGAACGAG-3′;
(GA459)
(SEQ ID NO: 3)
5′-GCAACUUACCCAGAGGCAAA-3′;
(GA460/GA520)
(SEQ ID NO: 4)
5′-UAUAGGAAAACCAGUGAGUC-3′;
or
(GA461)
(SEQ ID NO: 5)
5′-UACUCACCUCUGCAUGCUCA-3′.

5. The isolated polynucleotide or a nucleic acid encoding same of claim 1, wherein the isolated polynucleotide or a polynucleotide encoded same comprises a guide RNA.

6. A composition comprising the isolated polynucleotide or a nucleic acid encoding same of claim 1.

7. The composition of claim 6, further comprising a nucleic acid encoding a base editor fusion protein comprising a programmable DNA binding domain and a deaminase.

8. The composition of claim 7, wherein the deaminase comprises a cytosine deaminase or an adenine deaminase.

9. The composition of claim 8, wherein the programmable DNA binding domain comprises a catalytically impaired Cas9 protein.

10. The composition of claim 9, wherein the deaminase comprises ABE8.8.

11. A pharmaceutical composition comprising the isolated polynucleotide or a nucleic acid encoding same of claim 1.

12. A lipid nanoparticle (LNP) comprising the isolated polynucleotide or a nucleic acid encoding same of claim 1.

13. A pharmaceutical composition comprising the LNP of claim 12.

14. A method of effecting one or more nucleobase alterations in a TTR gene in a cell or a subject, the method comprising contacting the cell or subject with the isolated polynucleotide or a nucleic acid encoding same of claim 1.

15. The method of claim 14, wherein the subject suffers from, or is at risk of, hereditary transthyretin amyloidosis (hATTR) due to one or more mutations in the TTR gene.

16. A composition for editing a TTR gene comprising:
(a) a mRNA encoding a base editor protein having an editing window; and
(b) a guide RNA comprising a tracr sequence that serves as a binding scaffold for the base editor protein and a spacer sequence that serves to guide the base editor protein to a protospacer sequence on the TTR gene;
wherein the spacer sequence is complimentary, at least in part, to a splice site or a start codon of the TTR gene.

17. The composition of claim 16, wherein the base editor protein comprises a cytidine deaminase or an adenosine deaminase.

18. The composition of claim 16, wherein the base editor protein comprises a fusion protein comprising Adenine base editor ABE8.8.

19. The composition of claim 16, wherein the spacer sequence is or has about 85% identity to a spacer sequence selected from the following table:
gRNA spacer sequence (5′-3′)
gscscsAUCCUGCCAAGAAUGAG (SEQ ID NO: 6)
gscscsAUCCUGCCAAGAACGAG (SEQ ID NO: 7)
gscsasACUUACCCAGAGGCAAA (SEQ ID NO: 8)
usasusAGGAAAACCAGUGAGUC (SEQ ID NO: 9)
usascsUCACCUCUGCAUGCUCA (SEQ ID NO: 10)
gscscsAUCCUGCCAAGAACGAG (SEQ ID NO: 7)
wherein: A is adenosine; C is cytidine; G is guanosine; U is uridine; a is 2′-O-methyladenosine; c is 2′-O-methylcytidine; g is 2′-O-methylguanosine; u is 2′-O-methyluridine and s is phosphorothioate (PS) backbone linkage.

20. The composition of claim 16, wherein the guide RNA is selected from the following table:
Guide RNA sequence (5′-3′)
gscscsAUCCUGCCAAGAAUGAGGUUUUAGAGCUAGAAAUAGCAAGUUAA
AAUAAGGCUAGUCCGUUAUCAACUUGAAAAAGUGGCACCGAGUCGGUGCU
sususu(SEQ ID NO: 11)
AUCCUGCCAAGAACGAGGUUUUAGAGCUAGAAAUAGCAAGUUAAAAUAAG
GCUAGUCCGUUAUCAACUUGAAAAAGUGGCACCGAGUCGGUGCUsususu
(SEQ ID NO: 12)
gscsasACUUACCCAGAGGCAAAGUUUUAGAGCUAGAAAUAGCAAGUUAA
AAUAAGGCUAGUCCGUUAUCAACUUGAAAAAGUGGCACCGAGUCGGUGCU
sususu (SEQ ID NO: 13)
usasusAGGAAAACCAGUGAGUCGUUUUAGAGCUAGAAAUAGCAAGUUAA
AAUAAGGCUAGUCCGUUAUCAACUUGAAAAAGUGGCACCGAGUCGGUGCU
sususu (SEQ ID NO: 14)
usascsUCACCUCUGCAUGCUCAGUUUUAGAGCUAGAAAUAGCAAGUUAA
AAUAAGGCUAGUCCGUUAUCAACUUGAAAAAGUGGCACCGAGUCGGUGCU
sususu (SEQ ID NO: 15)
gscscsAUCCUGCCAAGAACGAGgUUUUAGagcuaGaaauagcaaGUUaA
aAuAaggcuaGUccGUUAucAAcuuGaaaaagugGcaccgagucggugcu
ususus (SEQ ID NO: 16)
usasusAGGAAAACCAGUGAGUCgUUUUAGagcuaGaaauagcaaGUUaA
aAuAaggcuaGUccGUUAucAAcuuGaaaaagugGcaccgagucggugcu
ususus (SEQ ID NO: 17)
wherein A is adenosine; C is cytidine; G is guanosine; U is uridine; a is 2′-O-methyladenosine; c is 2′-O-methylcytidine; g is 2′-O-methylguanosine; u is 2′-O-methyluridine and s is phosphorothioate (PS) backbone linkage and wherein bold type represents the spacer sequence.

The application's sequence listing, which the Patent Office published only in electronic form, follows.

SEQUENCE LISTING (5768 sequences)

SEQ ID NO: 1 - RNA, 20 nt, synthetic construct
  misc_feature 1..20: note = Description of Artificial Sequence: Synthetic oligonucleotide
  source 1..20: mol_type = other RNA
gccatcctgccaagaatgag

SEQ ID NO: 2 - RNA, 20 nt, synthetic construct
  misc_feature 1..20: note = Description of Artificial Sequence: Synthetic oligonucleotide
  source 1..20: mol_type = other RNA
gccatcctgccaagaacgag

SEQ ID NO: 3 - RNA, 20 nt, synthetic construct
  misc_feature 1..20: note = Description of Artificial Sequence: Synthetic oligonucleotide
  source 1..20: mol_type = other RNA
gcaacttacccagaggcaaa

SEQ ID NO: 4 - RNA, 20 nt, synthetic construct
  misc_feature 1..20: note = Description of Artificial Sequence: Synthetic oligonucleotide
  source 1..20: mol_type = other RNA
tataggaaaaccagtgagtc

SEQ ID NO: 5 - RNA, 20 nt, synthetic construct
  misc_feature 1..20: note = Description of Artificial Sequence: Synthetic oligonucleotide
  source 1..20: mol_type = other RNA
tactcacctctgcatgctca

SEQ ID NO: 6 - RNA, 20 nt, synthetic construct
  misc_feature 1..20: note = Description of Artificial Sequence: Synthetic oligonucleotide
  source 1..20: mol_type = other RNA
gccatcctgccaagaatgag

SEQ ID NO: 7 - RNA, 20 nt, synthetic construct
  misc_feature 1..20: note = Description of Artificial Sequence: Synthetic oligonucleotide
  source 1..20: mol_type = other RNA
gccatcctgccaagaacgag

SEQ ID NO: 8 - RNA, 20 nt, synthetic construct
  misc_feature 1..20: note = Description of Artificial Sequence: Synthetic oligonucleotide
  source 1..20: mol_type = other RNA
gcaacttacccagaggcaaa

SEQ ID NO: 9 - RNA, 20 nt, synthetic construct
  misc_feature 1..20: note = Description of Artificial Sequence: Synthetic oligonucleotide
  source 1..20: mol_type = other RNA
tataggaaaaccagtgagtc

SEQ ID NO: 10 - RNA, 20 nt, synthetic construct
  misc_feature 1..20: note = Description of Artificial Sequence: Synthetic oligonucleotide
  source 1..20: mol_type = other RNA
tactcacctctgcatgctca

SEQ ID NO: 11 - RNA, 100 nt, synthetic construct
  misc_feature 1..100: note = Description of Artificial Sequence: Synthetic polynucleotide
  source 1..100: mol_type = other RNA
gccatcctgccaagaatgaggttttagagctagaaatagcaagttaaaataaggctagtccgttatcaacttgaaaaagtggcaccgagtcggtgctttt

SEQ ID NO: 12 - RNA, 97 nt, synthetic construct
  misc_feature 1..97: note = Description of Artificial Sequence: Synthetic oligonucleotide
  source 1..97: mol_type = other RNA
atcctgccaagaacgaggttttagagctagaaatagcaagttaaaataaggctagtccgttatcaacttgaaaaagtggcaccgagtcggtgctttt

SEQ ID NO: 13 - RNA, 100 nt, synthetic construct
  misc_feature 1..100: note = Description of Artificial Sequence: Synthetic polynucleotide
  source 1..100: mol_type = other RNA
gcaacttacccagaggcaaagttttagagctagaaatagcaagttaaaataaggctagtccgttatcaacttgaaaaagtggcaccgagtcggtgctttt

SEQ ID NO: 14 - RNA, 100 nt, synthetic construct
  misc_feature 1..100: note = Description of Artificial Sequence: Synthetic polynucleotide
  source 1..100: mol_type = other RNA
tataggaaaaccagtgagtcgttttagagctagaaatagcaagttaaaataaggctagtccgttatcaacttgaaaaagtggcaccgagtcggtgctttt

SEQ ID NO: 15 - RNA, 100 nt, synthetic construct
  misc_feature 1..100: note = Description of Artificial Sequence: Synthetic polynucleotide
  source 1..100: mol_type = other RNA
tactcacctctgcatgctcagttttagagctagaaatagcaagttaaaataaggctagtccgttatcaacttgaaaaagtggcaccgagtcggtgctttt

SEQ ID NO: 16 - RNA, 100 nt, synthetic construct
  misc_feature 1..100: note = Description of Artificial Sequence: Synthetic polynucleotide
  source 1..100: mol_type = other RNA
gccatcctgccaagaacgaggttttagagctagaaatagcaagttaaaataaggctagtccgttatcaacttgaaaaagtggcaccgagtcggtgctttt

SEQ ID NO: 17 - RNA, 100 nt, synthetic construct; identical to SEQ ID NO: 14
  misc_feature 1..100: note = Description of Artificial Sequence: Synthetic polynucleotide
  source 1..100: mol_type = other RNA

SEQ ID NO: 18 - RNA, 100 nt, synthetic construct; identical to SEQ ID NO: 11
  misc_feature 1..100: note = Description of Artificial Sequence: Synthetic polynucleotide
  source 1..100: mol_type = other RNA

SEQ ID NO: 19 - RNA, 100 nt, synthetic construct; identical to SEQ ID NO: 16
  misc_feature 1..100: note = Description of Artificial Sequence: Synthetic polynucleotide
  source 1..100: mol_type = other RNA

SEQ ID NO: 20 - RNA, 100 nt, synthetic construct; identical to SEQ ID NO: 13
  misc_feature 1..100: note = Description of Artificial Sequence: Synthetic polynucleotide
  source 1..100: mol_type = other RNA

SEQ ID NO: 21 - RNA, 100 nt, synthetic construct; identical to SEQ ID NO: 14
  misc_feature 1..100: note = Description of Artificial Sequence: Synthetic polynucleotide
  source 1..100: mol_type = other RNA

SEQ ID NO: 22 - RNA, 100 nt, synthetic construct; identical to SEQ ID NO: 15
  misc_feature 1..100: note = Description of Artificial Sequence: Synthetic polynucleotide
  source 1..100: mol_type = other RNA

SEQ ID NO: 23 - protein, 147 aa, Homo sapiens
MASHRLLLLCLAGLVFVSEAGPTGTGESKCPLMVKVLDAVRGSPAINVAVHVFRKAADDTWEPFASGKTSESGELHGLTTEEEFVEGIYKVEIDTKSYWKALGISPFHEHAEVVFTANDSGPRRYTIAALLSPYSYSTTAVVTNPKE

SEQ ID NO: 24 - DNA, 20 bp, Homo sapiens
  source 1..20: mol_type = other DNA
gccatcctgccaagaatgag

SEQ ID NO: 25 - DNA, 20 bp, Homo sapiens
  source 1..20: mol_type = other DNA
gcaacttacccagaggcaaa

SEQ ID NO: 26 - DNA, 20 bp, unidentified
  misc_feature 1..20: note = Description of Unknown: Protospacer sequence
  source 1..20: mol_type = other DNA
tataggaaaaccagtgagtc

SEQ ID NO: 27 - DNA, 20 bp, unidentified
  misc_feature 1..20: note = Description of Unknown: Protospacer sequence
  source 1..20: mol_type = other DNA
tactcacctctgcatgctca

SEQ ID NO: 28 - DNA, 20 bp, Macaca fascicularis
  source 1..20: mol_type = other DNA
gccatcctgccaagaacgag

SEQ ID NO: 29 - RNA, 100 nt, synthetic construct; identical to SEQ ID NO: 16
  misc_feature 1..100: note = Description of Artificial Sequence: Synthetic polynucleotide
  source 1..100: mol_type = other RNA

SEQ ID NO: 30 - DNA, 33 bp, synthetic construct
  misc_feature 1..33: note = Description of Artificial Sequence: Synthetic oligonucleotide
  source 1..33: mol_type = other DNA
acactctttccctacacgacgctcttccgatct

SEQ ID NO: 31 - DNA, 34 bp, synthetic construct
  misc_feature 1..34: note = Description of Artificial Sequence: Synthetic oligonucleotide
  source 1..34: mol_type = other DNA
gtgactggagttcagacgtgtgctcttccgatct

SEQ ID NO: 32 - DNA, 20 bp, Homo sapiens
  source 1..20: mol_type = other DNA
gccatcctaccaggaatgaa

SEQ ID NO: 33 - DNA, 20 bp, Homo sapiens
  source 1..20: mol_type = other DNA
gccatcttgccaagaaaaag

SEQ ID NO: 34 - DNA, 21 bp, Homo sapiens
  source 1..21: mol_type = other DNA
gccatacctgccatgaatgag

SEQ ID NO: 35 - DNA, 20 bp, Homo sapiens
  source 1..20: mol_type = other DNA
gccatcctgacaggaatgag

SEQ ID NO: 36 - DNA, 20 bp, Homo sapiens
  source 1..20: mol_type = other DNA
accatcctgcaaagaatgat

SEQ ID NO: 37 - DNA, 19 bp, Homo sapiens
  source 1..19: mol_type = other DNA
gccatccaataagaatgag

SEQ ID NO: 38 - DNA, 20 bp, Homo sapiens
  source 1..20: mol_type = other DNA
gccatcctgacaagtatgag

SEQ ID NO: 39 - DNA, 20 bp, Homo sapiens
  source 1..20: mol_type = other DNA
ccatacctgccaagaatgaa

SEQ ID NO: 40 - DNA, 20 bp, Homo sapiens
  source 1..20: mol_type = other DNA
tgcatcctgccaaaaatggg

SEQ ID NO: 41 - DNA, 20 bp, Homo sapiens
  source 1..20: mol_type = other DNA
tgcatcctgccaagaagaag

SEQ ID NO: 42 - DNA, 19 bp, Homo sapiens
  source 1..19: mol_type = other DNA
gccatcctccaagaatgct

SEQ ID NO: 43 - DNA, 18 bp, Homo sapiens
  source 1..18: mol_type = other DNA
gccatctgcaagaaggag

SEQ ID NO: 44 - DNA, 20 bp, Homo sapiens
  source 1..20: mol_type = other DNA
gccatcctatcaagaataaa

SEQ ID NO: 45 - DNA, 19 bp, Homo sapiens
  source 1..19: mol_type = other DNA
tccatcctgtaagaatgag

SEQ ID NO: 46 - DNA, 20 bp, Homo sapiens
  source 1..20: mol_type = other DNA
ggccatctgccaagaaggat

SEQ ID NO: 47 - DNA, 20 bp, Homo sapiens
  source 1..20: mol_type = other DNA
accatcctgccagcaatgtg

SEQ ID NO: 48 - DNA, 20 bp, Homo sapiens
  source 1..20: mol_type = other DNA
tccatcctactaagaatgag

SEQ ID NO: 49 - DNA, 20 bp, Homo sapiens
  source 1..20: mol_type = other DNA
ggtatcctgccaagaatgga

SEQ ID NO: 50 - DNA, 20 bp, Homo sapiens
  source 1..20: mol_type = other DNA
tccatcctgccaagaattgc

SEQ ID NO: 51 - DNA, 18 bp, Homo sapiens
  source 1..18: mol_type = other DNA
gccatctgcaagaatgag

SEQ ID NO: 52 - DNA, 19 bp, Homo sapiens
  source 1..19: mol_type = other DNA
gccatcctgcaaatatgag

SEQ ID NO: 53 - DNA, 20 bp, Homo sapiens
  source 1..20: mol_type = other DNA
accatcctgtcaagaatcaa

SEQ ID NO: 54 - DNA, 20 bp, Homo sapiens
  source 1..20: mol_type = other DNA
gccatactaacaagaatgag

SEQ ID NO: 55 - DNA, 20 bp, Homo sapiens
  source 1..20: mol_type = other DNA
gtgatcctgccaggaataag

SEQ ID NO: 56 - DNA, 19 bp, Homo sapiens
  source 1..19: mol_type = other DNA
gccatcaagcaagaatgag

SEQ ID NO: 57 - DNA, 20 bp, Homo sapiens
  source 1..20: mol_type = other DNA
gccatcctcacaagtatgag

SEQ ID NO: 58 - DNA, 19 bp, Homo sapiens
  source 1..19: mol_type = other DNA
accatccagcaagaatgag

SEQ ID NO: 59 - DNA, 19 bp, Homo sapiens
  source 1..19: mol_type = other DNA
gccatatgccaaaaaggag

SEQ ID NO: 60 - DNA, 20 bp, Homo sapiens
  source 1..20: mol_type = other DNA
gacatcctgtcaaggatcag

SEQ ID NO: 61 - DNA, 18 bp, Homo sapiens
  source 1..18: mol_type = other DNA
gccatagccaaaaatgaa

SEQ ID NO: 62 - DNA, 20 bp, Homo sapiens
  source 1..20: mol_type = other DNA
gccataagccaaagaatgac

SEQ ID NO: 63 - DNA, 20 bp, Homo sapiens
  source 1..20: mol_type = other DNA
gccatcctaacaagtatgag

SEQ ID NO: 64 - DNA, 19 bp, Homo sapiens
  source 1..19: mol_type = other DNA
catatcctgccagaatgag

SEQ ID NO: 65 - DNA, 21 bp, Homo sapiens
  source 1..21: mol_type = other DNA
tacatcctaccaaggaatcag

SEQ ID NO: 66 - DNA, 20 bp, Homo sapiens
  source 1..20: mol_type = other DNA
cccatcctgccaagaagtgt

SEQ ID NO: 67 - DNA, 19 bp, Homo sapiens
  source 1..19: mol_type = other DNA
gccatcctacaaaaatgag

SEQ ID NO: 68 - DNA, 20 bp, Homo sapiens
  source 1..20: mol_type = other DNA
gtcatcctgccaggaatgaa

SEQ ID NO: 69 - DNA, 21 bp, Homo sapiens
  source 1..21: mol_type = other DNA
gccatatctgccaagaatgcg

SEQ ID NO: 70 - DNA, 20 bp, Homo sapiens
  source 1..20: mol_type = other DNA
tccatcctgtcaagaatgtg

SEQ ID NO: 71 - DNA, 18 bp, Homo sapiens
  source 1..18: mol_type = other DNA
tccatcctccagaatgag

SEQ ID NO: 72 - DNA, 20 bp, Homo sapiens
  source 1..20: mol_type = other DNA
gccatgctgccaagaatgat

SEQ ID NO: 73 - DNA, 19 bp, Homo sapiens
  source 1..19: mol_type = other DNA
gctatcctgccagaatgag

SEQ ID NO: 74 - DNA, 20 bp, Homo sapiens
  source 1..20: mol_type = other DNA
tgcatcctgacaagaaatag

SEQ ID NO: 75 - DNA, 18 bp, Homo sapiens
  source 1..18: mol_type = other DNA
tccatagccaagaatgag

SEQ ID NO: 76 - DNA, 19 bp, Homo sapiens
  source 1..19: mol_type = other DNA
accatctgtcaagaatgag

SEQ ID NO: 77 - DNA, 20 bp, Homo sapiens
  source 1..20: mol_type = other DNA
gccatcccgccaggaattat

SEQ ID NO: 78 - DNA, 20 bp, Homo sapiens
  source 1..20: mol_type = other DNA
accatccttccaagaagatg

SEQ ID NO: 79 - DNA, 20 bp, Homo sapiens
  source 1..20: mol_type = other DNA
acaaattacccagaggaaaa

SEQ ID NO: 80 - DNA, 20 bp, Homo sapiens
  source 1..20: mol_type = other DNA
tcaacttacccagagtcaaa

SEQ ID NO: 81 - DNA, 20 bp, Homo sapiens
  source 1..20: mol_type = other DNA
gcaacttgcccagaggcaca

SEQ ID NO: 82 - DNA, 20 bp, Homo sapiens
  source 1..20: mol_type = other DNA
gcaacatacccagtggcaaa

SEQ ID NO: 83 - DNA, 20 bp, Homo sapiens
  source 1..20: mol_type = other DNA
gcagcctacccagaggcaaa

SEQ ID NO: 84 - DNA, 20 bp, Homo sapiens
  source 1..20: mol_type = other DNA
gcaactcccccagaggcaaa

SEQ ID NO: 85 - DNA, 20 bp, Homo sapiens
  source 1..20: mol_type = other DNA
tagaggaaaaccagtcagtc

SEQ ID NO: 86 - DNA, 20 bp, Homo sapiens
  source 1..20: mol_type = other DNA
cataggaaaaccagtgagtt

SEQ ID NO: 87 - DNA, 20 bp, Homo sapiens
  source 1..20: mol_type = other DNA
taaaggaaaaccagtgggtc

SEQ ID NO: 88 - DNA, 20 bp, Homo sapiens
  source 1..20: mol_type = other DNA
tacacaactgtgcatgctca

SEQ ID NO: 89 - DNA, 20 bp, Homo sapiens
  source 1..20: mol_type = other DNA
tattcacctctgcatgctct

SEQ ID NO: 90 - DNA, 20 bp, Homo sapiens
  source 1..20: mol_type = other DNA
tacttacctctgcttgctca

SEQ ID NO: 91 - DNA, 20 bp, Homo sapiens
  source 1..20: mol_type = other DNA
tacacacctctacatgctca

SEQ ID NO: 92 - DNA, 23 bp, Homo sapiens
  source 1..23: mol_type = other DNA
tgcatcctgccaaaaatggggag

SEQ ID NO: 93 - DNA, 23 bp, Homo sapiens
  source 1..23: mol_type = other DNA
gccatcctaacaagtatgaggtg

SEQ ID NO: 94 - DNA, 23 bp, Homo sapiens
  source 1..23: mol_type = other DNA
gccataagccaaagaatgactgg

SEQ ID NO: 95 - DNA, 21 bp, Homo sapiens
  source 1..21: mol_type = other DNA
gccatccagaagaatgaaaag

SEQ ID NO: 96 - DNA, 22 bp, Homo sapiens
  source 1..22: mol_type = other DNA
gctatcctccaaggatgagcga

SEQ ID NO: 97 - DNA, 22 bp, Homo sapiens
  source 1..22: mol_type = other DNA
gccaccctccaagaagaagggg

SEQ ID NO: 98 - DNA, 22 bp, Homo sapiens
  source 1..22: mol_type = other DNA
gccatgtgccaagaatggtagg

SEQ ID NO: 99 - DNA, 22 bp, Homo sapiens
  source 1..22: mol_type = other DNA
tgcatcctgcaagcatgagtgg

SEQ ID NO: 100 - DNA, 23 bp, Homo sapiens
  source 1..23: mol_type = other DNA
aaaatcctaccaagaatgatgtg

SEQ ID NO: 101 - DNA, 22 bp, Homo sapiens
  source 1..22: mol_type = other DNA
tccatcctccaagaagaatggg

SEQ ID NO: 102 - DNA, 22 bp, Homo sapiens
  source 1..22: mol_type = other DNA
gccatccaccaagaaagtgggg

SEQ ID NO: 103 - DNA, 22 bp, Homo sapiens
  source 1..22: mol_type = other DNA
gccatctgccagcaatgagagg

SEQ ID NO: 104 - DNA, 23 bp, Homo sapiens
  source 1..23: mol_type = other DNA
gtaatccttacaagaatgagaga

SEQ ID NO: 105 - DNA, 23 bp, Homo sapiens
  source 1..23: mol_type = other DNA
gcatacctgccaagaatggacag

SEQ ID NO: 106 - DNA, 23 bp, Homo sapiens
  source 1..23: mol_type = other DNA
gccatcctgccaggagtgtggct

SEQ ID NO: 107 - DNA, 23 bp, Homo sapiens
  source 1..23: mol_type = other DNA
tacatcctgacaagaaaggggag

SEQ ID NO: 108 - DNA, 23 bp, Homo sapiens
  source 1..23: mol_type = other DNA
tccatactatcaagaatgagaaa

SEQ ID NO: 109 - DNA, 22 bp, Homo sapiens
  source 1..22: mol_type = other DNA
accatctgctaagaatgaagtg

SEQ ID NO: 110 - DNA, 23 bp, Homo sapiens
  source 1..23: mol_type = other DNA
aactacctgccaagtatgtgggg

SEQ ID NO: 111 - DNA, 22 bp, Homo sapiens
  source 1..22: mol_type = other DNA
accatcctgaaggaatgaggag

SEQ ID NO: 112 - DNA, 23 bp, Homo sapiens
  source 1..23: mol_type = other DNA
accatccagacaacaatgtgggg

SEQ ID NO: 113 - DNA, 24 bp, Homo sapiens
  source 1..24: mol_type = other DNA
accatcctgccaagaaaccagcag

SEQ ID NO: 114 - DNA, 23 bp, Homo sapiens
  source 1..23: mol_type = other DNA
gctataataccaagaatgatagg

SEQ ID NO: 115 - DNA, 22 bp, Homo sapiens
  source 1..22: mol_type = other DNA
gccatccaccaagaaggtggag

SEQ ID NO: 116 - DNA, 23 bp, Homo sapiens
  source 1..23: mol_type = other DNA
gccatcctaacaataatgaagtg

SEQ ID NO: 117 - DNA, 23 bp, Homo sapiens
  source 1..23: mol_type = other DNA
aagaacctaccaacaatgagagg

SEQ ID NO: 118 - DNA, 21 bp, Homo sapiens
  source 1..21: mol_type = other DNA
gccatccttcaggatgagggg

SEQ ID NO: 119 - DNA, 23 bp, Homo sapiens
  source 1..23: mol_type = other DNA
atcatcctgcccaggatatgggg

SEQ ID NO: 120 - DNA, 23 bp, Homo sapiens
  source 1..23: mol_type = other DNA
gtgctaatgccaagaatgtgtgg

SEQ ID NO: 121 - DNA, 23 bp, Homo sapiens
  source 1..23: mol_type = other DNA
acagtcctgccaagaatgagagg

SEQ ID NO: 122 - DNA, 23 bp, Homo sapiens
  source 1..23: mol_type = other DNA
gccatcctgctgataatgaggag

SEQ ID NO: 123 - DNA, 22 bp, Homo sapiens
  source 1..22: mol_type = other DNA
gccatcctgcagaaatgagtga

SEQ ID NO: 124 - DNA, 23 bp, Homo sapiens
  source 1..23: mol_type = other DNA
tacataccaccaagaatgagtgc

SEQ ID NO: 125 - DNA, 22 bp, Homo sapiens
  source 1..22: mol_type = other DNA
gccatgtgccaagaaggaatgg

SEQ ID NO: 126 - DNA, 23 bp, Homo sapiens
  source 1..23: mol_type = other DNA
tccttcctatcaagaatgtgaag

SEQ ID NO: 127 - DNA, 22 bp, Homo sapiens
  source 1..22: mol_type = other DNA
ggcatcctccaagaatagggga

SEQ ID NO: 128 - DNA, 23 bp, Homo sapiens
  source 1..23: mol_type = other DNA
gccattctgacaagaatagtgag

SEQ ID NO: 129 - DNA, 22 bp, Homo sapiens
  source 1..22: mol_type = other DNA
accatctagccagaatgtgtgg

SEQ ID NO: 130 - DNA, 23 bp, Homo sapiens
  source 1..23: mol_type = other DNA
tacatcctgacaagaaggaaatg

SEQ ID NO: 131 - DNA, 23 bp, Homo sapiens
  source 1..23: mol_type = other DNA
gccatcctaacaaatatgaggca

SEQ ID NO: 132 - DNA, 23 bp, Homo sapiens
  source 1..23: mol_type = other DNA
gcccttaagccaagaatgaggtg

SEQ ID NO: 133 - DNA, 22 bp, Homo sapiens
  source 1..22: mol_type = other DNA
gctatcatccaagaatgactgg

SEQ ID NO: 134 - DNA, 24 bp, Homo sapiens
  source 1..24: mol_type = other DNA
tccatcactcccaacaatgagtgg

SEQ ID NO: 135 - DNA, 22 bp, Homo sapiens
  source 1..22: mol_type = other DNA
gccatcagcaaagaatgcaagg

SEQ ID NO: 136 - DNA, 22 bp, Homo sapiens
  source 1..22: mol_type = other DNA
tgcatcctgacaaaataagagg

SEQ ID NO: 137 - DNA, 22 bp, Homo sapiens
  source 1..22: mol_type = other DNA
tccatatgccaagagggagtgg

SEQ ID NO: 138 - DNA, 21 bp, Homo sapiens
  source 1..21: mol_type = other DNA
gccattgccaacaatgtggag

SEQ ID NO: 139 - DNA, 21 bp, Homo sapiens
  source 1..21: mol_type = other DNA
ggcactgctaagaatgatagg

SEQ ID NO: 140 - DNA, 23 bp, Homo sapiens
  source 1..23: mol_type = other DNA
caaatgctgccaaggatgaggag

SEQ ID NO: 141 - DNA, 22 bp, Homo sapiens
  source 1..22: mol_type = other DNA
gtgatcctgaaagaatgagaag

SEQ ID NO: 142 - DNA, 23 bp, Homo sapiens
  source 1..23: mol_type = other DNA
acaaccctcccaagaatgatggc

SEQ ID NO: 143 - DNA, 23 bp, Homo sapiens
  source 1..23: mol_type = other DNA
gccatcctcacaataatgagtga

SEQ ID NO: 144 - DNA, 22 bp, Homo sapiens
  source 1..22: mol_type = other DNA
tccacctgccaaggatggggtg

SEQ ID NO: 145 - DNA, 23 bp, Homo sapiens
  source 1..23: mol_type = other DNA
gtcatccagccaagagtgggatg

SEQ ID NO: 146 - DNA, 23 bp, Homo sapiens
  source 1..23: mol_type = other DNA
gccatcctgcagagaataaagaa

SEQ ID NO: 147 - DNA, 22 bp, Homo sapiens
  source 1..22: mol_type = other DNA
cccacccttgaagaatgagtgg

SEQ ID NO: 148 - DNA, 22 bp, Homo sapiens
  source 1..22: mol_type = other DNA
gccatcctgctaggatgtggag

SEQ ID NO: 149 - DNA, 22 bp, Homo sapiens
  source 1..22: mol_type = other DNA
gatatccagcaagaatgacagg

SEQ ID NO: 150 - DNA, 23 bp, Homo sapiens
  source 1..23: mol_type = other DNA
gccatcttgcccaaaatgtgcgg

SEQ ID NO: 151 - DNA, 22 bp, Homo sapiens
  source 1..22: mol_type = other DNA
gccatcccccaagaatgaaccc

SEQ ID NO: 152 - DNA, 22 bp, Homo sapiens
  source 1..22: mol_type = other DNA
accatcattcaagaatgagtgt

SEQ ID NO: 153 - DNA, 23 bp, Homo sapiens
  source 1..23: mol_type = other DNA
gccatcctagtaggaatgaagtg

SEQ ID NO: 154 - DNA, 23 bp, Homo sapiens
  source 1..23: mol_type = other DNA
tcctaccagccatgaatgagggt

SEQ ID NO: 155 - DNA, 23 bp, Homo sapiens
  source 1..23: mol_type = other DNA
tgcagcctggcaggaatgtgtgg

SEQ ID NO: 156 - DNA, 23 bp, Homo sapiens
  source 1..23: mol_type = other DNA
accaacctgtcaagaagttgtgg

SEQ ID NO: 157 - DNA, 22 bp, Homo sapiens
  source 1..22: mol_type = other DNA
gccacatgctaggaataagagg

SEQ ID NO: 158 - DNA, 22 bp, Homo sapiens
  source 1..22: mol_type = other DNA
gccatcagcaatgtatgagagg

SEQ ID NO: 159 - DNA, 23 bp, Homo sapiens
  source 1..23: mol_type = other DNA
gccattctaacaagtatgaggtg

SEQ ID NO: 160 - DNA, 23 bp, Homo sapiens
  source 1..23: mol_type = other DNA
gcccatcagccaaggaggagagg

SEQ ID NO: 161 - DNA, 23 bp, Homo sapiens
  source 1..23: mol_type = other DNA
gccatcttgccaagaaaaagggg

SEQ ID NO: 162 - DNA, 23 bp, Homo sapiens
  source 1..23: mol_type = other DNA
ggtatcctgccaagaatggatgg

SEQ ID NO: 163 - DNA, 23 bp, Homo sapiens
  source 1..23: mol_type = other DNA
tccatcctgccaagaattgcagg

SEQ ID NO: 164 - DNA, 22 bp, Homo sapiens
  source 1..22: mol_type = other DNA
accatccagcaagaatgaggta

SEQ ID NO: 165 - DNA, 21 bp, Homo sapiens
  source 1..21: mol_type = other DNA
tccatcctccagaatgagaga

SEQ ID NO: 166 - DNA, 21 bp, Homo sapiens
  source 1..21: mol_type = other DNA
tccatagccaagaatgagaag

SEQ ID NO: 167 - DNA, 23 bp, Homo sapiens
  source 1..23: mol_type = other DNA
aatatcctgccaagaacaagcag

SEQ ID NO: 168 - DNA, 22 bp, Homo sapiens
  source 1..22: mol_type = other DNA
accacccagcaagaatgaggtg

SEQ ID NO: 169 - DNA, 22 bp, Homo sapiens
  source 1..22: mol_type = other DNA
cccatccagccagaatgagaag

SEQ ID NO: 170 - DNA, 23 bp, Homo sapiens
  source 1..23: mol_type = other DNA
accatcatgccaagaaaaagagg

SEQ ID NO: 171 - DNA, 23 bp, Homo sapiens
  source 1..23: mol_type = other DNA
gaccatcagccaagagtgagtgg

SEQ ID NO: 172 - DNA, 22 bp, Homo sapiens
  source 1..22: mol_type = other DNA
accatcctgcaagaatgttgga

SEQ ID NO: 173 - DNA, 23 bp, Homo sapiens
  source 1..23: mol_type = other DNA
gccatcctaacaagtatgagatg

SEQ ID NO: 174 - DNA, 23 bp, Homo sapiens
  source 1..23: mol_type = other DNA
ataatcctgccaataatgacggt

SEQ ID NO: 175 - DNA, 23 bp, Homo sapiens
  source 1..23: mol_type = other DNA
gccattctgacaagtatgagatg

SEQ ID NO: 176 - DNA, 21 bp, Homo sapiens
  source 1..21: mol_type = other DNA
gccagtgccaagaatgagatg

SEQ ID NO: 177 - DNA, 23 bp, Homo sapiens
  source 1..23: mol_type = other DNA
cccatcctgccaagataaatggt

SEQ ID NO: 178 - DNA, 22 bp, Homo sapiens
  source 1..22: mol_type = other DNA
tccatcttgcaagaatgaacgg

SEQ ID NO: 179 - DNA, 24 bp, Homo sapiens
  source 1..24: mol_type = other DNA
gccatcctgaccaacaatgattgg

SEQ ID NO: 180 - DNA, 23 bp, Homo sapiens
  source 1..23: mol_type = other DNA
gccatcctaacaagtatgaagtg

SEQ ID NO: 181 - DNA, 22 bp, Homo sapiens
  source 1..22: mol_type = other DNA
accatctgcccagaatgaaggg

SEQ ID NO: 182 - DNA, 23 bp, Homo sapiens
  source 1..23: mol_type = other DNA
tacaacctatcaagaatgagcga

SEQ ID NO: 183 - DNA, 23 bp, Homo sapiens
  source 1..23: mol_type = other DNA
gccagcctgcccagaatgaatgg

SEQ ID NO: 184 - DNA, 22 bp, Homo sapiens
  source 1..22: mol_type = other DNA
gccatatgccaaagatgaaggg

SEQ ID NO: 185 - DNA, 24 bp, Homo sapiens
  source 1..24: mol_type = other DNA
gccatcactgccaaaaatggggta

SEQ ID NO: 186 - DNA, 22 bp, Homo sapiens
  source 1..22: mol_type = other DNA
gccatccagacagaatgagatg

SEQ ID NO: 187 - DNA, 24 bp, Homo sapiens
  source 1..24: mol_type = other DNA
gacttactgccaaagaatgatggg

SEQ ID NO: 188 - DNA, 21 bp, Homo sapiens
  source 1..21: mol_type = other DNA
gccatccccaggaaggagggg

SEQ ID NO: 189 - DNA, 21 bp, Homo sapiens
  source 1..21: mol_type = other DNA
gccaacctaccaaataagtgg

SEQ ID NO: 190 - DNA, 23 bp, Homo sapiens
  source 1..23: mol_type = other DNA
gccatcctaacaggaatgagatg

SEQ ID NO: 191 - DNA, 23 bp, Homo sapiens
  source 1..23: mol_type = other DNA
gccatccaaccaagaatgatgct

SEQ ID NO: 192 - DNA, 23 bp, Homo sapiens
  source 1..23: mol_type = other DNA
ccaatactgacaagagtgagagg

SEQ ID NO: 193 - DNA, 21 bp, Homo sapiens
  source 1..21: mol_type = other DNA
gccattaaaaagaatgagtgg

SEQ ID NO: 194 - DNA, 21 bp, Homo sapiens
  source 1..21: mol_type = other DNA
gccatactgacaagagagtgg

SEQ ID NO: 195 - DNA, 23 bp, Homo sapiens
  source 1..23: mol_type = other DNA
ggcataatgccaagaatgaggga

SEQ ID NO: 196 - DNA, 21 bp, Homo sapiens
  source 1..21: mol_type = other DNA
gctatcctgccaaaagagtgg

SEQ ID NO: 197 - DNA, 23 bp, Homo sapiens
  source 1..23: mol_type = other DNA
cctttcctatcaagaaggagagg

SEQ ID NO: 198 - DNA, 23 bp, Homo sapiens
  source 1..23: mol_type = other DNA
gccatcctgactagtatgagacg

SEQ ID NO: 199 - DNA, 24 bp, Homo sapiens
  source 1..24: mol_type = other DNA
accatacctgctgagaatgagaga

SEQ ID NO: 200 - DNA, 23 bp, Homo sapiens
  source 1..23: mol_type = other DNA
gccatcctaccaggtgtgaggtg

SEQ ID NO: 201 - DNA, 24 bp, Homo sapiens
  source 1..24: mol_type = other DNA
gctattcctgccaaaaatggatgg

SEQ ID NO: 202 - DNA, 22 bp, Homo sapiens
  source 1..22: mol_type = other DNA
ttcatcctgccaaaaccagggg

SEQ ID NO: 203 - DNA, 23 bp, Homo sapiens
  source 1..23: mol_type = other DNA
tctgcactgccaagagtgagtgg

SEQ ID NO: 204 - DNA, 23 bp, Homo sapiens
  source 1..23: mol_type = other DNA
gccatcctgacaggtatgaggtg

SEQ ID NO: 205 - DNA, 22 bp, Homo sapiens
  source 1..22: mol_type = other DNA
gccatcctacagtaatgaatgg

SEQ ID NO: 206 - DNA, 21 bp, Homo sapiens
  source 1..21: mol_type = other DNA
ttcatcctgaagaatgagtgg

SEQ ID NO: 207 - DNA, 23 bp, Homo sapiens
  source 1..23: mol_type = other DNA
gccattaagccaaggatcagggg

SEQ ID NO: 208 - DNA, 23 bp, Homo sapiens
  source 1..23: mol_type = other DNA
attaacctgccaggaatgatggg

SEQ ID NO: 209 - DNA, 23 bp, Homo sapiens
  source 1..23: mol_type = other DNA
aatattctgtcaagaatgaggtg

SEQ ID NO: 210 - DNA, 23 bp, Homo sapiens
  source 1..23: mol_type = other DNA
gtattcctgccaagaatgtgtaa

SEQ ID NO: 211 - DNA, 23 bp, Homo sapiens
  source 1..23: mol_type = other DNA
gccatgagccaaagaatgagaag

SEQ ID NO: 212 - DNA, 24 bp, Homo sapiens
  source 1..24: mol_type = other DNA
cccatcactgccaagaatgaagta

SEQ ID NO: 213 - DNA, 23 bp, Homo sapiens
  source 1..23: mol_type = other DNA
gccatcacaagaagaatgaaagg

SEQ ID NO: 214 - DNA, 22 bp, Homo sapiens
  source 1..22: mol_type = other DNA
gccatctagcaggaatgtgagg

SEQ ID NO: 215 - DNA, 22 bp, Homo sapiens
  source 1..22: mol_type = other DNA
gccatgtgccaagaagaaggag

SEQ ID NO: 216 - DNA, 22 bp, Homo sapiens
  source 1..22: mol_type = other DNA
gacaacctgccagaatgaaaag

SEQ ID NO: 217 - DNA, 24 bp, Homo sapiens
  source 1..24: mol_type = other DNA
ttcatcctgccagagaatgatggg

SEQ ID NO: 218 - DNA, 24 bp, Homo sapiens
  source 1..24: mol_type = other DNA
tacatcctggccaagaatgtggtg

SEQ ID NO: 219 - DNA, 24 bp, Homo sapiens
  source 1..24: mol_type = other DNA
tccatccagcccaataatgagagg

SEQ ID NO: 220 - DNA, 23 bp, Homo sapiens
  source 1..23: mol_type = other DNA
gccaacctgtaaagagtgagggg

SEQ ID NO: 221 - DNA, 23 bp, Homo sapiens
  source 1..23: mol_type = other DNA
tccatattgccatgaatgacagg

SEQ ID NO: 222 - DNA, 21 bp, Homo sapiens
  source 1..21: mol_type = other DNA
accaatgccaaaaatgagagg

SEQ ID NO: 223 - DNA, 23 bp, Homo sapiens
  source 1..23: mol_type = other DNA
gccatcctaacaggtatgaggtg

SEQ ID NO: 224 - DNA, 23 bp, Homo sapiens
  source 1..23: mol_type = other DNA
aatatcctgccaagaaagagatg

SEQ ID NO: 225 - DNA, 22 bp, Homo sapiens
  source 1..22: mol_type = other DNA
gccatatgccaagaataacaga

SEQ ID NO: 226 - DNA, 23 bp, Homo sapiens
  source 1..23: mol_type = other DNA
tccatacaatcaagaatgagagg

SEQ ID NO: 227 - DNA, 22 bp, Homo sapiens
  source 1..22: mol_type = other DNA
gccatttatcaagagtgagagg

SEQ ID NO: 228 - DNA, 23 bp, Homo sapiens
  source 1..23: mol_type = other DNA
cagttcctgccaagaatgcaggg

SEQ ID NO: 229 - DNA, 23 bp, Homo sapiens
  source 1..23: mol_type = other DNA
gagaacatgccaaggatgagtag

SEQ ID NO: 230 - DNA, 23 bp, Homo sapiens
  source 1..23: mol_type = other DNA
tccatgttgccaagaatgacagg

SEQ ID NO: 231 - DNA, 22 bp, Homo sapiens
  source 1..22: mol_type = other DNA
tccatctgtcatgaatgagtga

SEQ ID NO: 232 - DNA, 23 bp, Homo sapiens
  source 1..23: mol_type = other DNA
gccattctgactagaatgagatg

SEQ ID NO: 233 - DNA, 23 bp, Homo sapiens
  source 1..23: mol_type = other DNA
cccaatgtgccaagcatgagtgt

SEQ ID NO: 234 - DNA, 23 bp, Homo sapiens
  source 1..23: mol_type = other DNA
gccatccctgcagtaatgagtgg

SEQ ID NO: 235 - DNA, 24 bp, Homo sapiens
  source 1..24: mol_type = other DNA
gccatccctgcaattaatgagggg

SEQ ID NO: 236 - DNA, 23 bp, Homo sapiens
  source 1..23: mol_type = other DNA
accctcccaccaagaatgggaga

SEQ ID NO: 237 - DNA, 23 bp, Homo sapiens
  source 1..23: mol_type = other DNA
gccattctactcagaatgagtag

SEQ ID NO: 238 - DNA, 21 bp, Homo sapiens
  source 1..21: mol_type = other DNA
ggccctgacaaaaatgagagg

SEQ ID NO: 239 - DNA, 21 bp, Homo sapiens
  source 1..21: mol_type = other DNA
gccaacctaaagaatgggagg

SEQ ID NO: 240 - DNA, 21 bp, Homo sapiens
  source 1..21: mol_type = other DNA
cccatccctcagaatgagagg

SEQ ID NO: 241 - DNA, 21 bp, Homo sapiens
  source 1..21: mol_type = other DNA
gacatcctacagaatgagaga

SEQ ID NO: 242 - DNA, 22 bp, Homo sapiens
  source 1..22: mol_type = other DNA
gccatgtggcaagaatgtgtgg

SEQ ID NO: 243 - DNA, 22 bp, Homo sapiens
  source 1..22: mol_type = other DNA
accatcctccaaggagcagggg

SEQ ID NO: 244 - DNA, 23 bp, Homo sapiens
  source 1..23: mol_type = other DNA
gccatcctaccaggaatgaatgg

SEQ ID NO: 245 - DNA, 23 bp, Homo sapiens
  source 1..23: mol_type = other DNA
accatcctgcaaagaatgatggc

SEQ ID NO: 246 - DNA, 23 bp, Homo sapiens
  source 1..23: mol_type = other DNA
ccatacctgccaagaatgaacag

SEQ ID NO: 247 - DNA, 23 bp, Homo sapiens
  source 1..23: mol_type = other DNA
gccatcctatcaagaataaacag

SEQ ID NO: 248 - DNA, 22 bp, Homo sapiens
  source 1..22: mol_type = other DNA
gccatcctacaaaaatgaggga

SEQ ID NO: 249 - DNA, 23 bp, Homo sapiens
  source 1..23: mol_type = other DNA
cccatcctgccaagaagtgtggt

SEQ ID NO: 250 - DNA, 22 bp, Homo sapiens
  source 1..22: mol_type = other DNA
gctatcctgccagaatgagagc

SEQ ID NO: 251 - DNA, 23 bp, Homo sapiens
  source 1..23: mol_type = other DNA
gccatcctgccatgagtgatagg

SEQ ID NO: 252 - DNA, 23 bp, Homo sapiens
  source 1..23: mol_type = other DNA
gccatcctgacaagtatgatgtg

SEQ ID NO: 253 - DNA, 23 bp, Homo sapiens
  source 1..23: mol_type = other DNA
aatatcctgacaagaatggatgg

SEQ ID NO: 254 - DNA, 23 bp, Homo sapiens
  source 1..23: mol_type = other DNA
aatatcctaccaagaatgaggtt

SEQ ID NO: 255 - DNA, 22 bp, Homo sapiens
  source 1..22: mol_type = other DNA
aacatcctgcaagaataagaag

SEQ ID NO: 256 - DNA, 23 bp, Homo sapiens
  source 1..23: mol_type = other DNA
gccatcctaacaagtatggggtg

SEQ ID NO: 257 - DNA, 23 bp, Homo sapiens
  source 1..23: mol_type = other DNA
gccatcctgccatgaaaaaggag

SEQ ID NO: 258 - DNA, 21 bp, Homo sapiens
  source 1..21: mol_type = other DNA
cccatcctgccaaatgtaggg

SEQ ID NO: 259 - DNA, 22 bp, Homo sapiens
  source 1..22: mol_type = other DNA
tccatatgccaagaatgaatag

SEQ ID NO: 260 - DNA, 23 bp, Homo sapiens
  source 1..23: mol_type = other DNA
gccataccaagaagaatgtgtgg

SEQ ID NO: 261 - DNA, 23 bp, Homo sapiens
  source 1..23: mol_type = other DNA
cctatcctgccatgaaagtggag

SEQ ID NO: 262 - DNA, 23 bp, Homo sapiens
  source 1..23: mol_type = other DNA
gccatcctgccaaatgagcgagc

SEQ ID NO: 263 - DNA, 23 bp, Homo sapiens
  source 1..23: mol_type = other DNA
tgcatactgccaaggatggatgg

SEQ ID NO: 264 - DNA, 23 bp, Homo sapiens
  source 1..23: mol_type = other DNA
gtcaatctaccaagaatgagagg

SEQ ID NO: 265 - DNA, 23 bp, Homo sapiens
  source 1..23: mol_type = other DNA
gccatcctaacaagagtgaggta

SEQ ID NO: 266 - DNA, 23 bp, Homo sapiens
  source 1..23: mol_type = other DNA
aataacctgccaagaatgagtca

SEQ ID NO: 267 - DNA, 23 bp, Homo sapiens
  source 1..23: mol_type = other DNA
tgcatcctgctaggaatgaggtg

SEQ ID NO: 268 - DNA, 22 bp, Homo sapiens
  source 1..22: mol_type = other DNA
accatctgccaagaaaaaggag

SEQ ID NO: 269 - DNA, 24 bp, Homo sapiens
  source 1..24: mol_type = other DNA
taaatcctgccaagagatgggggg

SEQ ID NO: 270 - DNA, 22 bp, Homo sapiens
  source 1..22: mol_type = other DNA
gccatccttcaaaaatgaagga

SEQ ID NO: 271 - DNA, 24 bp, Homo sapiens
  source 1..24: mol_type = other DNA
accatccatgtaaagaatcagtgg

SEQ ID NO: 272 - DNA, 24 bp, Homo sapiens
  source 1..24: mol_type = other DNA
cccatcctgacaagaaatcagcag

SEQ ID NO: 273 - DNA, 23 bp, Homo sapiens
  source 1..23: mol_type = other DNA
cttatcctgccattaatcagtgg

SEQ ID NO: 274 - DNA, 23 bp, Homo sapiens
  source 1..23: mol_type = other DNA
acccaactaccaagaatgagaag

SEQ ID NO: 275 - DNA, 23 bp, Homo sapiens
  source 1..23: mol_type = other DNA
gcaatcctgccaagcatgagctg

SEQ ID NO: 276 - DNA, 21 bp, Homo sapiens
  source 1..21: mol_type = other DNA
gccatcatgacaaatgagggg

SEQ ID NO: 277 - DNA, 23 bp, Homo sapiens
  source 1..23: mol_type = other DNA
tccaacctgccaagggtgagtgg

SEQ ID NO: 278 - DNA, 22 bp, Homo sapiens
  source 1..22: mol_type = other DNA
gccatccagccagaataaggac

SEQ ID NO: 279 - DNA, 23 bp, Homo sapiens
  source 1..23: mol_type = other DNA
accatactgctaagaattattgg

SEQ ID NO: 280 - DNA, 23 bp, Homo sapiens
  source 1..23: mol_type = other DNA
gttacactgcctagaatgaatgg

SEQ ID NO: 281 - DNA, 23 bp, Homo sapiens
  source 1..23: mol_type = other DNA
tctatcctgacaaaaatgagtga

SEQ ID NO: 282 - DNA, 23 bp, Homo sapiens
  source 1..23: mol_type = other DNA
accatcctgctaagaacaggaag

SEQ ID NO: 283 - DNA, 22 bp, Homo sapiens
  source 1..22: mol_type = other DNA
accatcctatcaagatgagcag

SEQ ID NO: 284 - DNA, 23 bp, Homo sapiens
  source 1..23: mol_type = other DNA
accatcctgccagaacttggggg

SEQ ID NO: 285 - DNA, 23 bp, Homo sapiens
  source 1..23: mol_type = other DNA
gccaccctgccaaggtggagggg

SEQ ID NO: 286 - DNA, 23 bp, Homo sapiens
  source 1..23: mol_type = other DNA
tgcatcatgccaagaaagaaggg

SEQ ID NO: 287 - DNA, 22 bp, Homo sapiens
  source 1..22: mol_type = other DNA
gccatctagcaaggaggagagg

SEQ ID NO: 288 - DNA, 22 bp, Homo sapiens
  source 1..22: mol_type = other DNA
aacatccttcaagaatgagtgt

SEQ ID NO: 289 - DNA, 23 bp, Homo sapiens
  source 1..23: mol_type = other DNA
gctatcctgacaagattgaaagg

SEQ ID NO: 290 - DNA, 21 bp, Homo sapiens
  source 1..21: mol_type = other DNA
ctcatcctgaagaataagtgg

SEQ ID NO: 291 - DNA, 23 bp, Homo sapiens
  source 1..23: mol_type = other DNA
tctttcatgccaaggatgagggg

SEQ ID NO: 292 - DNA, 23 bp, Homo sapiens
  source 1..23: mol_type = other DNA
gccatcctaacagtaatgagtga

SEQ ID NO: 293 - DNA, 23 bp, Homo sapiens
  source 1..23: mol_type = other DNA
accatcctgcaaacaatgaatga

SEQ ID NO: 294 - DNA, 22 bp, Homo sapiens
  source 1..22: mol_type = other DNA
gccatttgcaaagaatgagtag

SEQ ID NO: 295 - DNA, 23 bp, Homo sapiens
  source 1..23: mol_type = other DNA
agcatcctgccaagaagttgaga

SEQ ID NO: 296 - DNA, 22 bp, Homo sapiens
  source 1..22: mol_type = other DNA
gccaaatgccaacaatgtgagg

SEQ ID NO: 297 - DNA, 22 bp, Homo sapiens
  source 1..22: mol_type = other DNA
gccatcttacaagcatgagatg

SEQ ID NO: 298 - DNA, 23 bp, Homo sapiens
  source 1..23: mol_type = other DNA
gccatcctaacaagtgtgaggtg

SEQ ID NO: 299 - DNA, 23 bp, Homo sapiens
  source 1..23: mol_type = other DNA
cctgtcctaccaagaatcagagg

SEQ ID NO: 300 - DNA, 23 bp, Homo sapiens
  source 1..23: mol_type = other DNA
catattatgccaagaatcagtgg

SEQ ID NO: 301 - DNA, 21 bp, Homo sapiens
  source 1..21: mol_type = other DNA
gccatcgccaagaagatgtgg

SEQ ID NO: 302 - DNA, 22 bp, Homo sapiens
  source 1..22: mol_type = other DNA
atcttcctgccagaatgggagg

SEQ ID NO: 303 - DNA, 23 bp, Homo sapiens
  source 1..23: mol_type = other DNA
agcacactgcaaagaatgtgtgg

SEQ ID NO: 304 - DNA, 23 bp, Homo sapiens
  source 1..23: mol_type = other DNA
ttaatcctgccaacaatgatgtg

SEQ ID NO: 305 - DNA, 23 bp, Homo sapiens
  source 1..23: mol_type = other DNA
atcattatgctaagaatgaggag

SEQ ID NO: 306 - DNA, 23 bp, Homo sapiens
  source 1..23: mol_type = other DNA
tccatcctgtcaagaagtgaagg

SEQ ID NO: 307 - DNA, 23 bp, Homo sapiens
  source 1..23: mol_type = other DNA
gccatcttgccaataatgatatg

SEQ ID NO: 308 - DNA, 22 bp, Homo sapiens
  source 1..22: mol_type = other DNA
accatcctcagagaatgagagg

SEQ ID NO: 309 - DNA, 22 bp, Homo sapiens
  source 1..22: mol_type = other DNA
gctatccttcaaaaatgagaga

SEQ ID NO: 310 - DNA, 22 bp, Homo sapiens
  source 1..22: mol_type = other DNA
accatccaaacaagaatggtgg

SEQ ID NO: 311 - DNA, 23 bp, Homo sapiens
  source 1..23: mol_type = other DNA
gccatcctaacaagtgtgaggtt

SEQ ID NO: 312 - DNA, 23 bp, Homo sapiens
  source 1..23: mol_type = other DNA
cccaccctgcgaagaatggacag

SEQ ID NO: 313 - DNA, 22 bp, Homo sapiens
  source 1..22: mol_type = other DNA
gcctacaagccaagaagagggg

SEQ ID NO: 314 - DNA, 22 bp, Homo sapiens
  source 1..22: mol_type = other DNA
gccatccaataagaatgagtgg

SEQ ID NO: 315 - DNA, 22 bp, Homo sapiens
  source 1..22: mol_type = other DNA
gccatcagcaaagaatgagagc

SEQ ID NO: 316 - DNA, 23 bp, Homo sapiens
  source 1..23: mol_type = other DNA
gccatcctaacaggaatgaggtg

SEQ ID NO: 317 - DNA, 23 bp, Homo sapiens
  source 1..23: mol_type = other DNA
tctttactaccaagaatgagtga

SEQ ID NO: 318 - DNA, 22 bp, Homo sapiens
  source 1..22: mol_type = other DNA
gccatccaccaagaaagtggag

SEQ ID NO: 319 - DNA, 22 bp, Homo sapiens
  source 1..22: mol_type = other DNA
cccatctaccaagaatgaacag

SEQ ID NO: 320 - DNA, 22 bp, Homo sapiens
  source 1..22: mol_type = other DNA
gccatccaccaagaaagcgggg

SEQ ID NO: 321 - DNA, 23 bp, Homo sapiens
  source 1..23: mol_type = other DNA
gccatcctgcaagatgtgaggtg

SEQ ID NO: 322 - DNA, 23 bp, Homo sapiens
  source 1..23: mol_type = other DNA
gccatccttcccagaaagagggg

SEQ ID NO: 323 - DNA, 23 bp, Homo sapiens
  source 1..23: mol_type = other DNA
gtctatctgccaagaatgaggag

SEQ ID NO: 324 - DNA, 22 bp, Homo sapiens
  source 1..22: mol_type = other DNA
tcctatctgccaagaatagagg

SEQ ID NO: 325 - DNA, 22 bp, Homo sapiens
  source 1..22: mol_type = other DNA
gcccaccagcaagaatgagttg

SEQ ID NO: 326 - DNA, 21 bp, Homo sapiens
  source 1..21: mol_type = other DNA
gacatcctgaagaatgagaga

SEQ ID NO: 327 - DNA, 21 bp, Homo sapiens
  source 1..21: mol_type = other DNA
gccaccctacagaatgagtga

SEQ ID NO: 328 - DNA, 23 bp, Homo sapiens
  source 1..23: mol_type = other DNA
gccatcctaacaagcatgaggtg

SEQ ID NO: 329 - DNA, 23 bp, Homo sapiens
  source 1..23: mol_type = other DNA
gccaccatgccaaggatgtggtg

SEQ ID NO: 330 - DNA, 21 bp, Homo sapiens
  source 1..21: mol_type = other DNA
gccattctgaagaatgatagg

SEQ ID NO: 331 - DNA, 22 bp, Homo sapiens
  source 1..22: mol_type = other DNA
gccatccaccaagaaagcggag

SEQ ID NO: 332 - DNA, 22 bp, Homo sapiens
  source 1..22: mol_type = other DNA
cacatccagccaagattagtgg

SEQ ID NO: 333 - DNA, 22 bp, Homo sapiens
  source 1..22: mol_type = other DNA
gccatcattaaagaatgaatgg

SEQ ID NO: 334 - DNA, 21 bp, Homo sapiens
  source 1..21: mol_type = other DNA
tccatcctaccaagagcgtgg

SEQ ID NO: 335 - DNA, 22 bp, Homo sapiens
  source 1..22: mol_type = other DNA
atgatcctgccaagaaaagagg

SEQ ID NO: 336 - DNA, 21 bp, Homo sapiens
  source 1..21: mol_type = other DNA
tccatcctgccaaatgagtaa

SEQ ID NO: 337 - DNA, 23 bp, Homo sapiens
  source 1..23: mol_type = other DNA
gctatcctgccaagggcaagtgg

SEQ ID NO: 338 - DNA, 23 bp, Homo sapiens
  source 1..23: mol_type = other DNA
gccatcctgcctaatgggagggg

SEQ ID NO: 339 - DNA, 23 bp, Homo sapiens
  source 1..23: mol_type = other DNA
tccatcctgcaaagaacaagggg

SEQ ID NO: 340 - DNA, 22 bp, Homo sapiens
  source 1..22: mol_type = other DNA
gcccactgacaagaatgagcag

SEQ ID NO: 341 - DNA, 23 bp, Homo sapiens
  source 1..23: mol_type = other DNA
gccattctgacaagcatgagatg

SEQ ID NO: 342 - DNA, 23 bp, Homo sapiens
  source 1..23: mol_type = other DNA
gccattctgacaagagtgaggga

SEQ ID NO: 343 - DNA, 23 bp, Homo sapiens
  source 1..23: mol_type = other DNA
gccatcctgacaagtgtgaggta

SEQ ID NO: 344 - DNA, 22 bp, Homo sapiens
  source 1..22: mol_type = other DNA
gccatctgcaaggaatgatggg

SEQ ID NO: 345 - DNA, 22 bp, Homo sapiens
  source 1..22: mol_type = other DNA
gcctcctaccaagaaagaggca

SEQ ID NO: 346 - DNA, 23 bp, Homo sapiens
  source 1..23: mol_type = other DNA
gatattatgctaaggatgagggg

SEQ ID NO: 347 - DNA, 21 bp, Homo sapiens
  source 1..21: mol_type = other DNA
gccattgccaagaataagagt

SEQ ID NO: 348 - DNA, 21 bp, Homo sapiens
  source 1..21: mol_type = other DNA
tccatcttaaagaatgagtgg

SEQ ID NO: 349 - DNA, 22 bp, Homo sapiens
  source 1..22: mol_type = other DNA
gtctactgcaaagaatgtgggg

SEQ ID NO: 350 - DNA, 23 bp, Homo sapiens
  source 1..23: mol_type = other DNA
ccatgcctgccaaggatgagtgg

SEQ ID NO: 351 - DNA, 23 bp, Homo sapiens
  source 1..23: mol_type = other DNA
taaatcctgtcaagaatgagata

SEQ ID NO: 352 - DNA, 22 bp, Homo sapiens
  source 1..22: mol_type = other DNA
accatcattcaagaatgagggt

SEQ ID NO: 353 - DNA, 23 bp, Homo sapiens
  source 1..23: mol_type = other DNA
gccatcctgacagatatgaggtg

SEQ ID NO: 354 - DNA, 21 bp, Homo sapiens
  source 1..21: mol_type = other DNA
gccatttccatgaatgagtga

SEQ ID NO: 355 - DNA, 22 bp, Homo sapiens
  source 1..22: mol_type = other DNA
gccacactgccaagaagagctg

SEQ ID NO: 356 - DNA, 23 bp, Homo sapiens
  source 1..23: mol_type = other DNA
cctatcctgccaagaattactgc

SEQ ID NO: 357 - DNA, 23 bp, Homo sapiens
  source 1..23: mol_type = other DNA
cacttcctaccaagaaagagtga

SEQ ID NO: 358 - DNA, 23 bp, Homo sapiens
  source 1..23: mol_type = other DNA
tgctgcctgacaaggatgagtgg

SEQ ID NO: 359 - DNA, 23 bp, Homo sapiens
  source 1..23: mol_type = other DNA
gccattcttgcaagagtgaggtg

SEQ ID NO: 360 - DNA, 23 bp, Homo sapiens
  source 1..23: mol_type = other DNA
cccatcttgacaagaatgaaaag

SEQ ID NO: 361 - DNA, 23 bp, Homo sapiens
  source 1..23: mol_type = other DNA
tccatgctgccaagaagaggggt

SEQ ID NO: 362 - DNA, 22 bp, Homo sapiens
  source 1..22: mol_type = other DNA
tctatctgccaaggataagggg

SEQ ID NO: 363 - DNA, 22 bp, Homo sapiens
  source 1..22: mol_type = other DNA
gccatcttgctagaatgagagg

SEQ ID NO: 364 - DNA, 21 bp, Homo sapiens
  source 1..21: mol_type = other DNA
atcatcctgaagaatgaaagg

SEQ ID NO: 365 - DNA, 21 bp, Homo sapiens
  source 1..21: mol_type = other DNA
gccaacctacagaatgaggga

SEQ ID NO: 366 - DNA, 23 bp, Homo sapiens
  source 1..23: mol_type = other DNA
accctcctaccaagaatgaatta

SEQ ID NO: 367 - DNA, 22 bp, Homo sapiens
  source 1..22: mol_type = other DNA
gccatcagcaaagagtgagaag

SEQ ID NO: 368 - DNA, 22 bp, Homo sapiens
  source 1..22: mol_type = other DNA
gccacctgccaagaagcagggc

SEQ ID NO: 369 - DNA, 22 bp, Homo sapiens
  source 1..22: mol_type = other DNA
gccattcaccgagaatgaaggg

SEQ ID NO: 370 - DNA, 22 bp, Homo sapiens
  source 1..22: mol_type = other DNA
gccatccttccagaatggagga

SEQ ID NO: 371 - DNA, 23 bp, Homo sapiens
  source 1..23: mol_type = other DNA
cccatcctgccaagatatagaga

SEQ ID NO: 372 - DNA, 22 bp, Homo sapiens
  source 1..22: mol_type = other DNA
tctatctgccaagagtaagggg

SEQ ID NO: 373 - DNA, 22 bp, Homo sapiens
  source 1..22: mol_type = other DNA
tccatcatggcaagaagagagg

SEQ ID NO: 374 - DNA, 23 bp, Homo sapiens
  source 1..23: mol_type = other DNA
gccatcctaccttgaataaatgg

SEQ ID NO: 375 - DNA, 23 bp, Homo sapiens
  source 1..23: mol_type = other DNA
tgcatattgccaacaataagggg

SEQ ID NO: 376 - DNA, 23 bp, Homo sapiens
  source 1..23: mol_type = other DNA
gccatcctgccaagacactggaa

SEQ ID NO: 377 - DNA, 22 bp, Homo sapiens
  source 1..22: mol_type = other DNA
gccatttgccaagaaagagtag

SEQ ID NO: 378 - DNA, 24 bp, Homo sapiens
  source 1..24: mol_type = other DNA
gccatacctgccatgaatgaggaa

SEQ ID NO: 379 - DNA, 22 bp, Homo sapiens
  source 1..22: mol_type = other DNA
gccatcaagcaagaatgaggga

SEQ ID NO: 380 - DNA, 23 bp, Homo sapiens
  source 1..23: mol_type = other DNA
gccatccttgcaagagtgaggtg

SEQ ID NO: 381 - DNA, 23 bp, Homo sapiens
  source 1..23: mol_type = other DNA
gtcatcctgccaaaataaggagg

SEQ ID NO: 382 - DNA, 22 bp, Homo sapiens
  source 1..22: mol_type = other DNA
gccatcagccaagaatggggat

SEQ ID NO: 383 - DNA, 23 bp, Homo sapiens
  source 1..23: mol_type = other DNA
aacatcctaccaagaataagggt

SEQ ID NO: 384 - DNA, 24 bp, Homo sapiens
  source 1..24: mol_type = other DNA
gccatctctgccaagagtcagggg

SEQ ID NO: 385 - DNA, 22 bp, Homo sapiens
  source 1..22: mol_type = other DNA
gccatccttcaagaatgacagc

SEQ ID NO: 386 - DNA, 23 bp, Homo sapiens
  source 1..23: mol_type = other DNA
tatgtcctaccaagcatgagagg

SEQ ID NO: 387 - DNA, 23 bp, Homo sapiens
  source 1..23: mol_type = other DNA
ccatgcctgacaagaatgaggag

SEQ ID NO: 388 - DNA, 21 bp, Homo sapiens
  source 1..21: mol_type = other DNA
gccatctccaaaaatgtgagg

SEQ ID NO: 389 - DNA, 23 bp, Homo sapiens
  source 1..23: mol_type = other DNA
gccatactgccatgaataacagg

SEQ ID NO: 390 - DNA, 22 bp, Homo sapiens
  source 1..22: mol_type = other DNA
gccatcctatgagaatgagcag

SEQ ID NO: 391 - DNA, 21 bp, Homo sapiens
  source 1..21: mol_type = other DNA
gccaccctgaagagtgagggg

SEQ ID NO: 392 - DNA, 21 bp, Homo sapiens
  source 1..21: mol_type = other DNA
tccatcttgccaaatgatggg

SEQ ID NO: 393 - DNA, 22 bp, Homo sapiens
  source 1..22: mol_type = other DNA
ggcctctaccaaggatgagggg

SEQ ID NO: 394 - DNA, 23 bp, Homo sapiens
  source 1..23: mol_type = other DNA
gccactccagcaagaatgagtgg

SEQ ID NO: 395 - DNA, 23 bp, Homo sapiens
  source 1..23: mol_type = other DNA
gccatcctgacaagaatgcagac

SEQ ID NO: 396 - DNA, 23 bp, Homo sapiens
  source 1..23: mol_type = other DNA
cctcacctgacaagaatgaggtg

SEQ ID NO: 397 - DNA, 23 bp, Homo sapiens
  source 1..23: mol_type = other DNA
tcctgcataccaagaatgagttg

SEQ ID NO: 398 - DNA, 23 bp, Homo sapiens
  source 1..23: mol_type = other DNA
gccatcctgctgagtatgaagtg

SEQ ID NO: 399 - DNA, 23 bp, Homo sapiens
  source 1..23: mol_type = other DNA
gccatcctaacaagtataaggtg

SEQ ID NO: 400 - DNA, 23 bp, Homo sapiens
  source 1..23: mol_type = other DNA
ctctcactgacaagaatgagggg

SEQ ID NO: 401 - DNA, 23 bp, Homo sapiens
  source 1..23: mol_type = other DNA
acactcctacaaagaatgagaga

SEQ ID NO: 402 - DNA, 23 bp, Homo sapiens
  source 1..23: mol_type = other DNA
gtaatgataccaaggatgagagg

SEQ ID NO: 403 - DNA, 22 bp, Homo sapiens
  source 1..22: mol_type = other DNA
gccataccactagaatgagcgg

SEQ ID NO: 404 - DNA, 23 bp, Homo sapiens
  source 1..23: mol_type = other DNA
ccgtccatgccatgaatgagtgg

SEQ ID NO: 405 - DNA, 22 bp, Homo sapiens
  source 1..22: mol_type = other DNA
ggcatcctggaagaatgggtgg

SEQ ID NO: 406 - DNA, 22 bp, Homo sapiens
  source 1..22: mol_type = other DNA
accatcagccaataaagagtgg

SEQ ID NO: 407 - DNA, 23 bp, Homo sapiens
  source 1..23: mol_type = other DNA
agtaatctgccaagaatgagtga

SEQ ID NO: 408 - DNA, 22 bp, Homo sapiens
  source 1..22: mol_type = other DNA
gccaagtgccaaggatgaaagg

SEQ ID NO: 409 - DNA, 22 bp, Homo sapiens
  source 1..22: mol_type = other DNA
cacaccctgccaaagtgagagg

SEQ ID NO: 410 - DNA, 22 bp, Homo sapiens
  source 1..22: mol_type = other DNA
gccatatgcaaagaatgagaaa

SEQ ID NO: 411 - DNA, 23 bp, Homo sapiens
  source 1..23: mol_type = other DNA
gccaccctgcccagaatagaagg

SEQ ID NO: 412 - DNA, 23 bp, Homo sapiens
  source 1..23: mol_type = other DNA
accaacctgccaagagtgtggga

SEQ ID NO: 413 - DNA, 22 bp, Homo sapiens
  source 1..22: mol_type = other DNA
aagatcctgccagaatcagtgg

SEQ ID NO: 414 - DNA, 21 bp, Homo sapiens
  source 1..21: mol_type = other DNA
gtcactgccaagaatgagaaa

SEQ ID NO: 415 - DNA, 22 bp, Homo sapiens
  source 1..22: mol_type = other DNA
cccttccagccaaaatgagggg

SEQ ID NO: 416 - DNA, 23 bp, Homo sapiens
  source 1..23: mol_type = other DNA
tcagtagtgccaagaatgagaga

SEQ ID NO: 417 - DNA, 23 bp, Homo sapiens
  source 1..23: mol_type = other DNA
accatccatccaacaatgaggtg

SEQ ID NO: 418 - DNA, 22 bp, Homo sapiens
  source 1..22: mol_type = other DNA
ctcaacatgccagaatgagcgg

SEQ ID NO: 419 - DNA, 22 bp, Homo sapiens
  source 1..22: mol_type = other DNA
aacacccagccaagatgagagg

SEQ ID NO: 420 - DNA, 22 bp, Homo sapiens
  source 1..22: mol_type = other DNA
gccatcagccaaaagtgagaag

SEQ ID NO: 421 - DNA, 23 bp, Homo sapiens
  source 1..23: mol_type = other DNA
ggcatcctgccaggaatcagctg

SEQ ID NO: 422 - DNA, 23 bp, Homo sapiens
  source 1..23: mol_type = other DNA
gggacactgccattaatgagtgg

SEQ ID NO: 423 - DNA, 23 bp, Homo sapiens
  source 1..23: mol_type = other DNA
gccatcccaaaaagaatgaaatg

SEQ ID NO: 424 - DNA, 23 bp, Homo sapiens
  source 1..23: mol_type = other DNA
tccatcctgccaataattggttc

SEQ ID NO: 425 - DNA, 23 bp, Homo sapiens
  source 1..23: mol_type = other DNA
ggcatcttagcaaggatgagaag

SEQ ID NO: 426 - DNA, 24 bp, Homo sapiens
  source 1..24: mol_type = other DNA
gtcatcacttccaagagtgagcag

SEQ ID NO: 427 - DNA, 22 bp, Homo sapiens
  source 1..22: mol_type = other DNA
accatctttcaagaatgaatgg

SEQ ID NO: 428 - DNA, 23 bp, Homo sapiens
  source 1..23: mol_type = other DNA
cccctcctaccaagaaagaggca

SEQ ID NO: 429 - DNA, 23 bp, Homo sapiens
  source 1..23: mol_type = other DNA
gccattctgccaagaactgggtg

SEQ ID NO: 430 - DNA, 22 bp, Homo sapiens
  source 1..22: mol_type = other DNA
gccagcttgccaaaatgagcct

SEQ ID NO: 431 - DNA, 23 bp, Homo sapiens
  source 1..23: mol_type = other DNA
tccatcctgtcaagactgaggtc

SEQ ID NO: 432 - DNA, 23 bp, Homo sapiens
  source 1..23: mol_type = other DNA
accatcctttcatgaatgatggc

SEQ ID NO: 433 - DNA, 22 bp, Homo sapiens
  source 1..22: mol_type = other DNA
gccatcctcccaaatagatggg

SEQ ID NO: 434 - DNA, 23 bp, Homo sapiens
  source 1..23: mol_type = other DNA
gccatcctgacaggaatgaggtg

SEQ ID NO: 435 - DNA, 23 bp, Homo sapiens
  source 1..23: mol_type = other DNA
ggccatctgccaagaaggatggg

SEQ ID NO: 436 - DNA, 22 bp, Homo sapiens
  source 1..22: mol_type = other DNA
gccatgtgccaagaataacggc

SEQ ID NO: 437 - DNA, 23 bp, Homo sapiens
  source 1..23: mol_type = other DNA
ttcatcctaccaagaataggagt

SEQ ID NO: 438 - DNA, 23 bp, Homo sapiens
  source 1..23: mol_type = other DNA
acaatactgccaagaataatagg

SEQ ID NO: 439 - DNA, 22 bp, Homo sapiens
  source 1..22: mol_type = other DNA
tccatcagccaagaatgaaagc

SEQ ID NO: 440 - DNA, 22 bp, Homo sapiens
  source 1..22: mol_type = other DNA
ctcatcctgccaagaagagaga

SEQ ID NO: 441 - DNA, 23 bp, Homo sapiens
  source 1..23: mol_type = other DNA
tacaacctaccaagaatgaatag

SEQ ID NO: 442 - DNA, 21 bp, Homo sapiens
  source 1..21: mol_type = other DNA
gccatcctacaaaatgaatgg

SEQ ID NO: 443 - DNA, 23 bp, Homo sapiens
  source 1..23: mol_type = other DNA
cccatacagccaagaatgagaaa

SEQ ID NO: 444 - DNA, 22 bp, Homo sapiens
  source 1..22: mol_type = other DNA
gctatccttcaagaatgaagga

SEQ ID NO: 445 - DNA, 23 bp, Homo sapiens
  source 1..23: mol_type = other DNA
aacaccctactaagaatgagcag

SEQ ID NO: 446 - DNA, 21 bp, Homo sapiens
  source 1..21: mol_type = other DNA
gccattgcaaagaatgagaaa

SEQ ID NO: 447 - DNA, 22 bp, Homo sapiens
  source 1..22: mol_type = other DNA
gccatcagccgaaaatgagagg

SEQ ID NO: 448 - DNA, 23 bp, Homo sapiens
  source 1..23: mol_type = other DNA
gtgttcctaccaggaatgaatgg

SEQ ID NO: 449 - DNA, 22 bp, Homo sapiens
  source 1..22: mol_type = other DNA
gccatccctcaagagtgagtga

SEQ ID NO: 450 - DNA, 23 bp, Homo sapiens
  source 1..23: mol_type = other DNA
gggatcctgccaacaatgagagg

SEQ ID NO: 451 - DNA, 22 bp, Homo sapiens
  source 1..22: mol_type = other DNA
gccaatctgtaagaatgaggga

SEQ ID NO: 452 - DNA, 23 bp, Homo sapiens
  source 1..23: mol_type = other DNA
gcctcactgccaagaatgacagg

SEQ ID NO: 453 - DNA, 23 bp, Homo sapiens
  source 1..23: mol_type = other DNA
gccagtctaccaaggatgagcag

SEQ ID NO: 454 - DNA, 23 bp, Homo sapiens
  source 1..23: mol_type = other DNA
gccatcctgaaaagaatgagaca

SEQ ID NO: 455 - DNA, 22 bp, Homo sapiens
  source 1..22: mol_type = other DNA
cccatcctaccaggatgaggga

SEQ ID NO: 456 - DNA, 22 bp, Homo sapiens
  source 1..22: mol_type = other DNA
gccatctgcctagaatgaaagt

SEQ ID NO: 457 - DNA, 22 bp, Homo sapiens
  source 1..22: mol_type = other DNA
gccatttgccaagaataagagg

SEQ ID NO: 458 - DNA, 23 bp, Homo sapiens
  source 1..23: mol_type = other DNA
gccatcctaacagatatgagtgg

SEQ ID NO: 459 - DNA, 23 bp, Homo sapiens
  source 1..23: mol_type = other DNA
tatatcctgccatgaacaagagg

SEQ ID NO: 460 - DNA, 21 bp, Homo sapiens
  source 1..21: mol_type = other DNA
gtcattaccaagaatgaatgg

SEQ ID NO: 461 - DNA, 23 bp, Homo sapiens
  source 1..23: mol_type = other DNA
gccattcttgcaagaatgaggtg

SEQ ID NO: 462 - DNA, 23 bp, Homo sapiens
  source 1..23: mol_type = other DNA
gccatccttgcaataatgagtga

SEQ ID NO: 463 - DNA, 24 bp, Homo sapiens
  source 1..24: mol_type = other DNA
ggcatccagccaaagaatgagcag

SEQ ID NO: 464 - DNA, 23 bp, Homo sapiens
  source 1..23: mol_type = other DNA
gccatgcctgcaagcatgagtgg

SEQ ID NO: 465 - DNA, 23 bp, Homo sapiens
  source 1..23: mol_type = other DNA
tacagtctacaaagaatgagagg

SEQ ID NO: 466 - DNA, 23 bp, Homo sapiens
  source 1..23: mol_type = other DNA
gccatcctccctagaatgagaat

SEQ ID NO: 467 - DNA, 22 bp, Homo sapiens
  source 1..22: mol_type = other DNA
gccatccttcaacaatgaggaa

SEQ ID NO: 468 - DNA, 23 bp, Homo sapiens
  source 1..23: mol_type = other DNA
gccatatattcaagaatgagaga

SEQ ID NO: 469 - DNA, 22 bp, Homo sapiens
  source 1..22: mol_type = other DNA
accatctgcaaggaatgagaga

SEQ ID NO: 470 - DNA, 23 bp, Homo sapiens
  source 1..23: mol_type = other DNA
gtcatactgctaagaataatagg

SEQ ID NO: 471 - DNA, 22 bp, Homo sapiens
  source 1..22: mol_type = other DNA
gccatcaatcaacaatgagtgg

SEQ ID NO: 472 - DNA, 22 bp, Homo sapiens
  source 1..22: mol_type = other DNA
gctatctactaagaatgaaagg

SEQ ID NO: 473 - DNA, 24 bp, Homo sapiens
  source 1..24: mol_type = other DNA
cctatgcctgccaaggatgagtag

SEQ ID NO: 474 - DNA, 23 bp, Homo sapiens
  source 1..23: mol_type = other DNA
tccatgatgccatgaatgacagg

SEQ ID NO: 475 - DNA, 22 bp, Homo sapiens
  source 1..22: mol_type = other DNA
tccatctgtaaagaatgagagg

SEQ ID NO: 476 - DNA, 23 bp, Homo sapiens
  source 1..23: mol_type = other DNA
caagtgcagccaagaatgagggg

SEQ ID NO: 477 - DNA, 23 bp, Homo sapiens
  source 1..23: mol_type = other DNA
tcaataatgccaagaatgagaaa

SEQ ID NO: 478 - DNA, 21 bp, Homo sapiens
  source 1..21: mol_type = other DNA
gccactgccgagaatgaggaa

SEQ ID NO: 479 - DNA, 23 bp, Homo sapiens
  source 1..23: mol_type = other DNA
accattctgacaagcatgagatg

SEQ ID NO: 480 - DNA, 23 bp, Homo sapiens
  source 1..23: mol_type = other DNA
gtagacctgccaagtatgtgagg

SEQ ID NO: 481 - DNA, 24 bp, Homo sapiens
  source 1..24: mol_type = other DNA
gccatttgagccaagtatgagggg

SEQ ID NO: 482 - DNA, 22 bp, Homo sapiens
  source 1..22: mol_type = other DNA
tccatcctgccaaagatagttg

SEQ ID NO: 483 - DNA, 22 bp, Homo sapiens
  source 1..22: mol_type = other DNA
gcctcctaccaagaatgtatga

SEQ ID NO: 484 - DNA, 23 bp, Homo sapiens
  source 1..23: mol_type = other DNA
gccatcttgccaggattaagagg

SEQ ID NO: 485 - DNA, 24 bp, Homo sapiens
  source 1..24: mol_type = other DNA
accatcctgccaggtatagtgagg

SEQ ID NO: 486 - DNA, 23 bp, Homo sapiens
  source 1..23: mol_type = other DNA
gccatcctaacaagtgtgaggta

SEQ ID NO: 487 - DNA, 23 bp, Homo sapiens
  source 1..23: mol_type = other DNA
tacatcctgcccagaattaagag

SEQ ID NO: 488 - DNA, 23 bp, Homo sapiens
  source 1..23: mol_type = other DNA
tccatcctgccaagattctggag

SEQ ID NO: 489 - DNA, 22 bp, Homo sapiens
  source 1..22: mol_type = other DNA
gctatccagcaagaatggcggg

SEQ ID NO: 490 - DNA, 23 bp, Homo sapiens
  source 1..23: mol_type = other DNA
tccatcctactaagaatgaggag

SEQ ID NO: 491 - DNA, 23 bp, Homo sapiens
  source 1..23: mol_type = other DNA
gccatcctcacaagtatgagtgg

SEQ ID NO: 492 - DNA, 23 bp, Homo sapiens
  source 1..23: mol_type = other DNA
ccgatcctgcccagaatgagcgg

SEQ ID NO: 493 - DNA, 21 bp, Homo sapiens
  source 1..21: mol_type = other DNA
gccatcctaatgaatgtgtgg

SEQ ID NO: 494 - DNA, 22 bp, Homo sapiens
  source 1..22: mol_type = other DNA
gccatcctggaaggatgggtgg

SEQ ID NO: 495 - DNA, 22 bp, Homo sapiens
  source 1..22: mol_type = other DNA
gccatctcccaagaatgagagc

SEQ ID NO: 496 - DNA, 23 bp, Homo sapiens
  source 1..23: mol_type = other DNA
gccatccttcaaaggatgaagtg

SEQ ID NO: 497 - DNA, 23 bp, Homo sapiens
  source 1..23: mol_type = other DNA
ggccttatgccaagaatgatgag

SEQ ID NO: 498 - DNA, 23 bp, Homo sapiens
  source 1..23: mol_type = other DNA
gccatccttccaagtgtgaggag

SEQ ID NO: 499 - DNA, 23 bp, Homo sapiens
  source 1..23: mol_type = other DNA
ggccacccgcctagaatgaatgg

SEQ ID NO: 500 - DNA, 21 bp, Homo sapiens
  source 1..21: mol_type = other DNA
tccatactgccaaatgaaagg

SEQ ID NO: 501 - DNA, 21 bp, Homo sapiens
  source 1..21: mol_type = other DNA
gccatccccaagaaggagaga

SEQ ID NO: 502 - DNA, 23 bp, Homo sapiens
  source 1..23: mol_type = other DNA
actgtactgcctagaatgagggg

SEQ ID NO: 503 - DNA, 22 bp, Homo sapiens
  source 1..22: mol_type = other DNA
accatcttgcaagaatgtttgg

SEQ ID NO: 504 - DNA, 23 bp, Homo sapiens
  source 1..23: mol_type = other DNA
gccatcctgacaggaataaggcg

SEQ ID NO: 505 - DNA, 22 bp, Homo sapiens
  source 1..22: mol_type = other DNA
gacatctgccaacaatgtgagg

SEQ ID NO: 506 - DNA, 22 bp, Homo sapiens
  source 1..22: mol_type = other DNA
gccatcctgtaagtgtgagtgg

SEQ ID NO: 507 - DNA, 23 bp, Homo sapiens
  source 1..23: mol_type = other DNA
ccgatcctgcccaggatgagcgg

SEQ ID NO: 508 - DNA, 23 bp, Homo sapiens
  source 1..23: mol_type = other DNA
taaatcctgccaagaatttctgg

SEQ ID NO: 509 - DNA, 23 bp, Homo sapiens
  source 1..23: mol_type = other DNA
aacatactgccatgaatgtgggg

SEQ ID NO: 510 - DNA, 23 bp, Homo sapiens
  source 1..23: mol_type = other DNA
accatcctgcaaggtatgtgggg

SEQ ID NO: 511 - DNA, 24 bp, Homo sapiens
  source 1..24: mol_type = other DNA
gccaccactgccatcaatgagggg

SEQ ID NO: 512 - DNA, 23 bp, Homo sapiens
  source 1..23: mol_type = other DNA
gccatctttgtaagaatgtgagg

SEQ ID NO: 513 - DNA, 22 bp, Homo sapiens
  source 1..22: mol_type = other DNA
gaccccctaccaagaagagagg

SEQ ID NO: 514 - DNA, 22 bp, Homo sapiens
  source 1..22: mol_type = other DNA
ggccacctgccaagatgaaggg

SEQ ID NO: 515 - DNA, 21 bp, Homo sapiens
  source 1..21: mol_type = other DNA
gacatcctgaagaatgaaatg

SEQ ID NO: 516 - DNA, 23 bp, Homo sapiens
  source 1..23: mol_type = other DNA
accttcctgacaagaatgagggg

SEQ ID NO: 517 - DNA, 23 bp, Homo sapiens
  source 1..23: mol_type = other DNA
gccatcattttaagaatgagatg

SEQ ID NO: 518 - DNA, 21 bp, Homo sapiens
  source 1..21: mol_type = other DNA
gccatccagccaggtgagatg

SEQ ID NO: 519 - DNA, 23 bp, Homo sapiens
  source 1..23: mol_type = other DNA
agattcctgccaagaatgatgag

SEQ ID NO: 520 - DNA, 23 bp, Homo sapiens
  source 1..23: mol_type = other DNA
cccatcctgcccagcatgagggg

SEQ ID NO: 521 - DNA, 23 bp, Homo sapiens
  source 1..23: mol_type = other DNA
tgctaactgccaagaatgagggc

SEQ ID NO: 522 - DNA, 23 bp, Homo sapiens
  source 1..23: mol_type = other DNA
ttcatccttccatgaatgaaagg

SEQ ID NO: 523 - DNA, 23 bp, Homo sapiens
  source 1..23: mol_type = other DNA
cccatcctgccaggaatttgaga

SEQ ID NO: 524 - DNA, 23 bp, Homo sapiens
  source 1..23: mol_type = other DNA
cacaacctcccaaggatgagtgg

SEQ ID NO: 525 - DNA, 23 bp, Homo sapiens
  source 1..23: mol_type = other DNA
cacaccctgcgaagaataaggag

SEQ ID NO: 526 - DNA, 23 bp, Homo sapiens
  source 1..23: mol_type = other DNA
ctcatcctaccaagaagtaggga

SEQ ID NO: 527 - DNA, 23 bp, Homo sapiens
  source 1..23: mol_type = other DNA
accatcctgagagaaatgaggtg

SEQ ID NO: 528 - DNA, 23 bp, Homo sapiens
  source 1..23: mol_type = other DNA
gccatcctgccaggatggtagga

SEQ ID NO: 529 - DNA, 22 bp, Homo sapiens
  source 1..22: mol_type = other DNA
gccatcggccaagaatgttgag

SEQ ID NO: 530 - DNA, 23 bp, Homo sapiens
  source 1..23: mol_type = other DNA
gatatactgccaagaagatgagg

SEQ ID NO: 531 - DNA, 23 bp, Homo sapiens
  source 1..23: mol_type = other DNA
tacatcatgctaagaatgaggga

SEQ ID NO: 532 - DNA, 22 bp, Homo sapiens
  source 1..22: mol_type = other DNA
gaaatccagccagaatgaatgg

SEQ ID NO: 533 - DNA, 23 bp, Homo sapiens
  source 1..23: mol_type = other DNA
gccagcatgcaaagaatgagggg

SEQ ID NO: 534 - DNA, 23 bp, Homo sapiens
  source 1..23: mol_type = other DNA
gccatcccaccatgaagaaggag

SEQ ID NO: 535 - DNA, 23 bp, Homo sapiens
  source 1..23: mol_type = other DNA
gccatcctggcagtaatgagtga

SEQ ID NO: 536 - DNA, 22 bp, Homo sapiens
  source 1..22: mol_type = other DNA
gtcatcccccaaaaatgagggg

SEQ ID NO: 537 - DNA, 23 bp, Homo sapiens
  source 1..23: mol_type = other DNA
cccaacctgtcaagaatgaacat

SEQ ID NO: 538 - DNA, 23 bp, Homo sapiens
  source 1..23: mol_type = other DNA
accatcccagcaagtatgaggtg

SEQ ID NO: 539 - DNA, 23 bp, Homo sapiens
  source 1..23: mol_type = other DNA
gagaacatgctaagaatgagcag

SEQ ID NO: 540 - DNA, 23 bp, Homo sapiens
  source 1..23: mol_type = other DNA
gccatcctgtgaagtatgaggtg

SEQ ID NO: 541 - DNA, 23 bp, Homo sapiens
  source 1..23: mol_type = other DNA
gcatttatgccaggaatgtgagg

SEQ ID NO: 542 - DNA, 23 bp, Homo sapiens
  source 1..23: mol_type = other DNA
gccatcctagcaggcatgacttg

SEQ ID NO: 543 - DNA, 23 bp, Homo sapiens
  source 1..23: mol_type = other DNA
tgcatcttgccatgaatgaagag

SEQ ID NO: 544 - DNA, 23 bp, Homo sapiens
  source 1..23: mol_type = other DNA
gccattctaacaagaatggggtg

SEQ ID NO: 545 - DNA, 22 bp, Homo sapiens
  source 1..22: mol_type = other DNA
cccaccctgcaaagaagagggg

SEQ ID NO: 546 - DNA, 23 bp, Homo sapiens
  source 1..23: mol_type = other DNA
gagagcctgccctgaatgagggg

SEQ ID NO: 547 - DNA, 23 bp, Homo sapiens
  source 1..23: mol_type = other DNA
gacatcctgccaagaagcagaca

SEQ ID NO: 548 - DNA, 23 bp, Homo sapiens
  source 1..23: mol_type = other DNA
tccatagagacaagaatgaaagg

SEQ ID NO: 549 - DNA, 23 bp, Homo sapiens
  source 1..23: mol_type = other DNA
gtcatactgccaagaataaatca

SEQ ID NO: 550 - DNA, 21 bp, Homo sapiens
  source 1..21: mol_type = other DNA
gccattctgccaggtgagtag

SEQ ID NO: 551 - DNA, 23 bp, Homo sapiens
  source 1..23: mol_type = other DNA
aataacctgccacgaataagtgg

SEQ ID NO: 552 - DNA, 23 bp, Homo sapiens
  source 1..23: mol_type = other DNA
gcattcctaccaacaatgaatga

SEQ ID NO: 553 - DNA, 22 bp, Homo sapiens
  source 1..22: mol_type = other DNA
gccaccctgcaagaagatgcgg

SEQ ID NO: 554 - DNA, 23 bp, Homo sapiens
  source 1..23: mol_type = other DNA
tgcatcctgacaagaaatagtgg

SEQ ID NO: 555 - DNA, 23 bp, Homo sapiens
  source 1..23: mol_type = other DNA
actatactgcaaagaatgagaag

SEQ ID NO: 556 - DNA, 23 bp, Homo sapiens
  source 1..23: mol_type = other DNA
tcccatcagccaagaatgagagg

SEQ ID NO: 557 - DNA, 22 bp, Homo sapiens
  source 1..22: mol_type = other DNA
atcatccaccaagagtgagggg

SEQ ID NO: 558 - DNA, 23 bp, Homo sapiens
  source 1..23: mol_type = other DNA
gtattcctgccaagaaagaggag

SEQ ID NO: 559 - DNA, 23 bp, Homo sapiens
  source 1..23: mol_type = other DNA
tccatcctgttaagaaggagagg

SEQ ID NO: 560 - DNA, 23 bp, Homo sapiens
  source 1..23: mol_type = other DNA
attttactgccaagaatgagaga

SEQ ID NO: 561 - DNA, 22 bp, Homo sapiens
  source 1..22: mol_type = other DNA
gccatcttgcaggaatgagtga

SEQ ID NO: 562 - DNA, 23 bp, Homo sapiens
  source 1..23: mol_type = other DNA
gctatactgccaagagtatgggg

SEQ ID NO: 563 - DNA, 24 bp, Homo sapiens
  source 1..24: mol_type = other DNA
accatcatagccaagaatgaaaag

SEQ ID NO: 564 - DNA, 22 bp, Homo sapiens
  source 1..22: mol_type = other DNA
tacatctgtcaagaatgtgtgg

SEQ ID NO: 565 - DNA, 22 bp, Homo sapiens
  source 1..22: mol_type = other DNA
gctatccttcaagaatgaaggg

SEQ ID NO: 566 - DNA, 22 bp, Homo sapiens
  source 1..22: mol_type = other DNA
gccatctgagaagaatgaatgg

SEQ ID NO: 567 - DNA, 23 bp, Homo sapiens
  source 1..23: mol_type = other DNA
gtgatcctgcaaagaatgactgg

SEQ ID NO: 568 - DNA, 22 bp, Homo sapiens
  source 1..22: mol_type = other DNA
gccatgagccaagagtgaggag

SEQ ID NO: 569 - DNA, 23 bp, Homo sapiens
  source 1..23: mol_type = other DNA
gccatcctgactagtatgagatg

SEQ ID NO: 570 - DNA, 23 bp, Homo sapiens
  source 1..23: mol_type = other DNA
tccatcctgccatgaaagagggt

SEQ ID NO: 571 - DNA, 22 bp, Homo sapiens
  source 1..22: mol_type = other DNA
gccagcctgcaagaataacagg

SEQ ID NO: 572 - DNA, 23 bp, Homo sapiens
  source 1..23: mol_type = other DNA
tgtatcctgccaagaaggagatc

SEQ ID NO: 573 - DNA, 22 bp, Homo sapiens
  source 1..22: mol_type = other DNA
gccatagagccaagaagagtgg

SEQ ID NO: 574 - DNA, 23 bp, Homo sapiens
  source 1..23: mol_type = other DNA
tccatcatgccaagaaataaatg

SEQ ID NO: 575 - DNA, 23 bp, Homo sapiens
  source 1..23: mol_type = other DNA
accatcataccaagaatgagcat

SEQ ID NO: 576 - DNA, 21 bp, Homo sapiens
  source 1..21: mol_type = other DNA
ggcactgacaagaatgagaag

SEQ ID NO: 577 - DNA, 22 bp, Homo sapiens
  source 1..22: mol_type = other DNA
gatatccagccaagaagagtga

SEQ ID NO: 578 - DNA, 23 bp, Homo sapiens
  source 1..23: mol_type = other DNA
gtcatccagccaagaagtggtgt

SEQ ID NO: 579 - DNA, 23 bp, Homo sapiens
  source 1..23: mol_type = other DNA
gccatcctgacaggtatgggtgg

SEQ ID NO: 580 - DNA, 23 bp, Homo sapiens
  source 1..23: mol_type = other DNA
gctcatcagcaaagaatgagagg

SEQ ID NO: 581 - DNA, 21 bp, Homo sapiens
  source 1..21: mol_type = other DNA
gccattaccacgaatgagatg

SEQ ID NO: 582 - DNA, 23 bp, Homo sapiens
  source 1..23: mol_type = other DNA
gccatcctgacagatgtgaggtg

SEQ ID NO: 583 - DNA, 22 bp, Homo sapiens
  source 1..22: mol_type = other DNA
ataatcctgccaagaagacagg

SEQ ID NO: 584 - DNA, 23 bp, Homo sapiens
  source 1..23: mol_type = other DNA
ttaatcctgcccagaataatagg

SEQ ID NO: 585 - DNA, 23 bp, Homo sapiens
  source 1..23: mol_type = other DNA
gtcatcctgccaggaatatggat

SEQ ID NO: 586 - DNA, 22 bp, Homo sapiens
  source 1..22: mol_type = other DNA
gccatctgccaaggaggaacgg

SEQ ID NO: 587 - DNA, 23 bp, Homo sapiens
  source 1..23: mol_type = other DNA
tccatcatgccaagaaacggggg

SEQ ID NO: 588 - DNA, 23 bp, Homo sapiens
  source 1..23: mol_type = other DNA
gccatcctaacaagtgtggggtg

SEQ ID NO: 589 - DNA, 22 bp, Homo sapiens
  source 1..22: mol_type = other DNA
gccaccatgccaagatgggagg

SEQ ID NO: 590 - DNA, 22 bp, Homo sapiens
  source 1..22: mol_type = other DNA
gccatcagacaagaaagagaga

SEQ ID NO: 591 - DNA, 21 bp, Homo sapiens
  source 1..21: mol_type = other DNA
gccaccccaaagaatgcgagg

SEQ ID NO: 592 - DNA, 23 bp, Homo sapiens
  source 1..23: mol_type = other DNA
gcccacatgccaaggatgaaggg

SEQ ID NO: 593 - DNA, 22 bp, Homo sapiens
  source 1..22: mol_type = other DNA
gctacatgccaaggatgagagc

SEQ ID NO: 594 - DNA, 23 bp, Homo sapiens
  source 1..23: mol_type = other DNA
tccttccagccaagaatgaaaag

SEQ ID NO: 595 - DNA, 23 bp, Homo sapiens
  source 1..23: mol_type = other DNA
aacatcctggaaagaatgtgtgg

SEQ ID NO: 596 - DNA, 23 bp, Homo sapiens
  source 1..23: mol_type = other DNA
gtcatactgccaagaaagaagaa

SEQ ID NO: 597 - DNA, 23 bp, Homo sapiens
  source 1..23: mol_type = other DNA
tccatcctgccaggaaagctggt

SEQ ID NO: 598 - DNA, 23 bp, Homo sapiens
  source 1..23: mol_type = other DNA
gcattcctaccaggaatgaatga

SEQ ID NO: 599 - DNA, 23 bp, Homo sapiens
  source 1..23: mol_type = other DNA
gccaccatgccaggagagaggag

SEQ ID NO: 600 - DNA, 23 bp, Homo sapiens
  source 1..23: mol_type = other DNA
tccatcctgccaagagtttccgg

SEQ ID NO: 601 - DNA, 23 bp, Homo sapiens
  source 1..23: mol_type = other DNA
accatcctgacaagtgtgaggca

SEQ ID NO: 602 - DNA, 23 bp, Homo sapiens
  source 1..23: mol_type = other DNA
gtgatcctgccaggaataaggag

SEQ ID NO: 603 - DNA, 23 bp, Homo sapiens
  source 1..23: mol_type = other DNA
gccatcatgccattaatcagagg

SEQ ID NO: 604 - DNA, 22 bp, Homo sapiens
  source 1..22: mol_type = other DNA
gtcatccagcaagaatgatagg

SEQ ID NO: 605 - DNA, 24 bp, Homo sapiens
  source 1..24: mol_type = other DNA
cctatactgccaaagaatgtgagg

SEQ ID NO: 606 - DNA, 22 bp, Homo sapiens
  source 1..22: mol_type = other DNA
gacatcctggaagaatgtgggg

SEQ ID NO: 607 - DNA, 22 bp, Homo sapiens
  source 1..22: mol_type = other DNA
gccatgtagcaagaatgagaag

SEQ ID NO: 608 - DNA, 21 bp, Homo sapiens
  source 1..21: mol_type = other DNA
gccatcctaaggaatgtgagg

SEQ ID NO: 609 - DNA, 23 bp, Homo sapiens
  source 1..23: mol_type = other DNA
tccatcctgtcaagatgaagtgg

SEQ ID NO: 610 - DNA, 21 bp, Homo sapiens
  source 1..21: mol_type = other DNA
gccattgccaagaaggaaagg

SEQ ID NO: 611 - DNA, 22 bp, Homo sapiens
  source 1..22: mol_type = other DNA
agcatactaccaagaagagagg

SEQ ID NO: 612 - DNA, 21 bp, Homo sapiens
  source 1..21: mol_type = other DNA
gctactgccaaggatgatggg

SEQ ID NO: 613 - DNA, 22 bp, Homo sapiens
  source 1..22: mol_type = other DNA
gccattcagccaagaagagagg

SEQ ID NO: 614 - DNA, 22 bp, Homo sapiens
  source 1..22: mol_type = other DNA
gccatctttcaaaaatgaggag

SEQ ID NO: 615 - DNA, 23 bp, Homo sapiens
  source 1..23: mol_type = other DNA
cacaacctgccaaaaatgagcag

SEQ ID NO: 616 - DNA, 22 bp, Homo sapiens
  source 1..22: mol_type = other DNA
gccatcagcaaagaatgtaagg

SEQ ID NO: 617 - DNA, 23 bp, Homo sapiens
  source 1..23: mol_type = other DNA
tatatccagcaaagaatgtgtgg

SEQ ID NO: 618 - DNA, 21 bp, Homo sapiens
  source 1..21: mol_type = other DNA
tccattgccaaaaatgaggag

SEQ ID NO: 619 - DNA, 23 bp, Homo sapiens
  source 1..23: mol_type = other DNA
actatcctgccaagcaaaagagg

SEQ ID NO: 620 - DNA, 23 bp, Homo sapiens
  source 1..23: mol_type = other DNA
taaatcctgccataaatgagaag

SEQ ID NO: 621 - DNA, 23 bp, Homo sapiens
  source 1..23: mol_type = other DNA
accatccaacctaggatgagaag

SEQ ID NO: 622 - DNA, 23 bp, Homo sapiens
  source 1..23: mol_type = other DNA
gccatcctgctaagaatctgatg

SEQ ID NO: 623 - DNA, 23 bp, Homo sapiens
  source 1..23: mol_type = other DNA
accatccttacaaaaatgaaagg

SEQ ID NO: 624 - DNA, 23 bp, Homo sapiens
  source 1..23: mol_type = other DNA
tcgtttctacaaagaatgagggg

SEQ ID NO: 625 - DNA, 23 bp, Homo sapiens
  source 1..23: mol_type = other DNA
aacagactatcaagaatgagagg

SEQ ID NO: 626 - DNA, 22 bp, Homo sapiens
  source 1..22: mol_type = other DNA
accatcctgtcaggaatagcag

SEQ ID NO: 627 - DNA, 24 bp, Homo sapiens
  source 1..24: mol_type = other DNA
tccatctctacaaagaatgaaggg

SEQ ID NO: 628 - DNA, 21 bp, Homo sapiens
  source 1..21: mol_type = other DNA
accatccctaagaatgggggg

SEQ ID NO: 629 - DNA, 24 bp, Homo sapiens
  source 1..24: mol_type = other DNA
gccatacttgccaagaaaggggga

SEQ ID NO: 630 - DNA, 23 bp, Homo sapiens
  source 1..23: mol_type = other DNA
gaggaactgccaaggatgagggg

SEQ ID NO: 631 - DNA, 23 bp, Homo sapiens
  source 1..23: mol_type = other DNA
tagatcctgcaaggaatgagtag

SEQ ID NO: 632 - DNA, 22 bp, Homo sapiens
  source 1..22: mol_type = other DNA
agcatcctccaggaatgagtag

SEQ ID NO: 633 - DNA, 23 bp, Homo sapiens
  source 1..23: mol_type = other DNA
gccatcttgccaaaaataatggc

SEQ ID NO: 634 - DNA, 22 bp, Homo sapiens
  source 1..22: mol_type = other DNA
tccaccttccaaaaatgagttg

SEQ ID NO: 635 - DNA, 23 bp, Homo sapiens
  source 1..23: mol_type = other DNA
gacatcctatcaggaatgggggt

SEQ ID NO: 636 - DNA, 23 bp, Homo sapiens
  source 1..23: mol_type = other DNA
accatactgccaaaaatgatcta

SEQ ID NO: 637 - DNA, 23 bp, Homo sapiens
  source 1..23: mol_type = other DNA
gacatcctaccaagaaggatgac

SEQ ID NO: 638 - DNA, 22 bp, Homo sapiens
  source 1..22: mol_type = other DNA
gccatccttcaagagtgagacg

SEQ ID NO: 639 - DNA, 23 bp, Homo sapiens
  source 1..23: mol_type = other DNA
tcaattataccaagaatgtgtgg

SEQ ID NO: 640 - DNA, 23 bp, Homo sapiens
  source 1..23: mol_type = other DNA
gcattactgccaagaatcaaagg

SEQ ID NO: 641 - DNA, 21 bp, Homo sapiens
  source 1..21: mol_type = other DNA
tccatacccaagaatgacagg

SEQ ID NO: 642 - DNA, 23 bp, Homo sapiens
  source 1..23: mol_type = other DNA
gccatcctgacaagtatgaggtg

SEQ ID NO: 643 - DNA, 21 bp, Homo sapiens
  source 1..21: mol_type = other DNA
gccatctgcaagaaggagagg

SEQ ID NO: 644 - DNA, 22 bp, Homo sapiens
  source 1..22: mol_type = other DNA
tccatcctgtaagaatgaggag

SEQ ID NO: 645 - DNA, 23 bp, Homo sapiens
  source 1..23: mol_type = other DNA
tccatcctgtcaagaatgtggca

SEQ ID NO: 646 - DNA, 23 bp, Homo sapiens
  source 1..23: mol_type = other DNA
atcatcctaacaagaatgacagg

SEQ ID NO: 647 - DNA, 23 bp, Homo sapiens
  source 1..23: mol_type = other DNA
agccacctgcccagaatgaggag

SEQ ID NO: 648 - DNA, 23 bp, Homo sapiens
  source 1..23: mol_type = other DNA
gccatcctaacaaatgtgaggtg

SEQ ID NO: 649 - DNA, 21 bp, Homo sapiens
  source 1..21: mol_type = other DNA
gccatcctaatgaatgtgagg

SEQ ID NO: 650 - DNA, 23 bp, Homo sapiens
  source 1..23: mol_type = other DNA
cccatcataccaagaatcaggag

SEQ ID NO: 651 - DNA, 23 bp, Homo sapiens
  source 1..23: mol_type = other DNA
accatcctgccaaatgtgagtgg

SEQ ID NO: 652 - DNA, 23 bp, Homo sapiens
  source 1..23: mol_type = other DNA
ttaatcctaccaggaatgaaagg

SEQ ID NO: 653 - DNA, 23 bp, Homo sapiens
  source 1..23: mol_type = other DNA
gctatccttccatgaatgaatgg

SEQ ID NO: 654 - DNA, 23 bp, Homo sapiens
  source 1..23: mol_type = other DNA
ctcatcctgtcaagaagcagggg

SEQ ID NO: 655 - DNA, 23 bp, Homo sapiens
  source 1..23: mol_type = other DNA
gccatcctaacaagagtgaggca

SEQ ID NO: 656 - DNA, 23 bp, Homo sapiens
  source 1..23: mol_type = other DNA
ggtatcctgccaagatgggaggg

SEQ ID NO: 657 - DNA, 24 bp, Homo sapiens
  source 1..24: mol_type = other DNA
gctatcctgccaagagatgggaac

SEQ ID NO: 658 - DNA, 23 bp, Homo sapiens
  source 1..23: mol_type = other DNA
ggcatcctgccaagactgagggg

SEQ ID NO: 659 - DNA, 23 bp, Homo sapiens
  source 1..23: mol_type = other DNA
gccatcctgcaaagaacgataag

SEQ ID NO: 660 - DNA, 23 bp, Homo sapiens
  source 1..23: mol_type = other DNA
gccatcctgacaagtgtgaggtg

SEQ ID NO: 661 - DNA, 23 bp, Homo sapiens
  source 1..23: mol_type = other DNA
gccaccctgccaagtgtggggag

SEQ ID NO: 662 - DNA, 23 bp, Homo sapiens
  source 1..23: mol_type = other DNA
cacatcctgcccaaaatgtgtgg

SEQ ID NO: 663 - DNA, 23 bp, Homo sapiens
  source 1..23: mol_type = other DNA
accatgccagcaagaatgatggg

SEQ ID NO: 664 - DNA, 21 bp, Homo sapiens
  source 1..21: mol_type = other DNA
gccatccccaagtgtgagggg

SEQ ID NO: 665 - DNA, 22 bp, Homo sapiens
  source 1..22: mol_type = other DNA
gccaactagcaagagtgagagg

SEQ ID NO: 666 - DNA, 23 bp, Homo sapiens
  source 1..23: mol_type = other DNA
gggattctaccaagaatgaaaag

SEQ ID NO: 667 - DNA, 23 bp, Homo sapiens
  source 1..23: mol_type = other DNA
accatcctgccaagaagcctgtg

SEQ ID NO: 668 - DNA, 23 bp, Homo sapiens
  source 1..23: mol_type = other DNA
acacacctgccaagaaggagatg

SEQ ID NO: 669 - DNA, 22 bp, Homo sapiens
  source 1..22: mol_type = other DNA
ttcacctgctaagaatgtgagg

SEQ ID NO: 670 - DNA, 21 bp, Homo sapiens
  source 1..21: mol_type = other DNA
gccaccctcaagagtgagggg

SEQ ID NO: 671 - DNA, 23 bp, Homo sapiens
  source 1..23: mol_type = other DNA
gccatcctgcccagaatggagac

SEQ ID NO: 672 - DNA, 22 bp, Homo sapiens
  source 1..22: mol_type = other DNA
tccatccacccaaaatgagaga

SEQ ID NO: 673 - DNA, 23 bp, Homo sapiens
  source 1..23: mol_type = other DNA
gcctgagtgccaagtatgaggtg

SEQ ID NO: 674 - DNA, 23 bp, Homo sapiens
  source 1..23: mol_type = other DNA
tccatcctgcaagggatgaaagg

SEQ ID NO: 675 - DNA, 23 bp, Homo sapiens
  source 1..23: mol_type = other DNA
gacacactgccatgaatgtgagg

SEQ ID NO: 676 - DNA, 23 bp, Homo sapiens
  source 1..23: mol_type = other DNA
caaatctagccaagaatgagtag

SEQ ID NO: 677 - DNA, 22 bp, Homo sapiens
  source 1..22: mol_type = other DNA
cccatcctccaggaatgacagg

SEQ ID NO: 678 - DNA, 22 bp, Homo sapiens
  source 1..22: mol_type = other DNA
gccttctgcaaaggatgagtga

SEQ ID NO: 679 - DNA, 23 bp, Homo sapiens
  source 1..23: mol_type = other DNA
gccatactgccagggatgggggt

SEQ ID NO: 680 - DNA, 22 bp, Homo sapiens
  source 1..22: mol_type = other DNA
aagatcctgcatgaatgagagg

SEQ ID NO: 681 - DNA, 21 bp, Homo sapiens
  source 1..21: mol_type = other DNA
gccactgcctagaatgagctg

SEQ ID NO: 682 - DNA, 22 bp, Homo sapiens
  source 1..22: mol_type = other DNA
gccaccctccaaggatctgagg

SEQ ID NO: 683 - DNA, 23 bp, Homo sapiens
  source 1..23: mol_type = other DNA
gccatactaacaagaatgaggtg

SEQ ID NO: 684 - DNA, 23 bp, Homo sapiens
  source 1..23: mol_type = other DNA
gacatcctaccaagaaggatgag

SEQ ID NO: 685 - DNA, 24 bp, Homo sapiens
  source 1..24: mol_type = other DNA
gccatcctgctcaagaatagctgg

SEQ ID NO: 686 - DNA, 23 bp, Homo sapiens
  source 1..23: mol_type = other DNA
gccatcctaccagatgtgaggtg

SEQ ID NO: 687 - DNA, 22 bp, Homo sapiens
  source 1..22: mol_type = other DNA
accatcagccaagaatatgcgg

SEQ ID NO: 688 - DNA, 23 bp, Homo sapiens
  source 1..23: mol_type = other DNA
actatcctgccaagtaggagggg

SEQ ID NO: 689 - DNA, 21 bp, Homo sapiens
  source 1..21: mol_type = other DNA
gccatcctaaagaatgtgaag

SEQ ID NO: 690 - DNA, 21 bp, Homo sapiens
  source 1..21: mol_type = other DNA
gccaataccaagaatgagaga

SEQ ID NO: 691 - DNA, 22 bp, Homo sapiens
  source 1..22: mol_type = other DNA
tccatcctgccaaaagcagagg

SEQ ID NO: 692 - DNA, 23 bp, Homo sapiens
  source 1..23: mol_type = other DNA
aacaccctgccaagaatggaggc

SEQ ID NO: 693 - DNA, 22 bp, Homo sapiens
  source 1..22: mol_type = other DNA
accatccagcaagaaggagtag

SEQ ID NO: 694 - DNA, 23 bp, Homo sapiens
  source 1..23: mol_type = other DNA
tctacactgccaagagtgagtgg

SEQ ID NO: 695 - DNA, 23 bp, Homo sapiens
  source 1..23: mol_type = other DNA
acctgactaccaagaatgagtag

SEQ ID NO: 696 - DNA, 21 bp, Homo sapiens
  source 1..21: mol_type = other DNA
gccatcattaagaatgagaga

SEQ ID NO: 697 - DNA, 23 bp, Homo sapiens
  source 1..23: mol_type = other DNA
gccatcctaataagtatgaagtg

SEQ ID NO: 698 - DNA, 23 bp, Homo sapiens
  source 1..23: mol_type = other DNA
tccatccttgcaagaatgagggg

SEQ ID NO: 699 - DNA, 21 bp, Homo sapiens
  source 1..21: mol_type = other DNA
gacattgccaagaatgaggtg

SEQ ID NO: 700 - DNA, 23 bp, Homo sapiens
  source 1..23: mol_type = other DNA
gacatactgccaaggaggagagg

SEQ ID NO: 701 - DNA, 24 bp, Homo sapiens
  source 1..24: mol_type = other DNA
tccatcactggcaagaatgactgg

SEQ ID NO: 702 - DNA, 23 bp, Homo sapiens
  source 1..23: mol_type = other DNA
agcatcctgccaaggattctggg

SEQ ID NO: 703 - DNA, 23 bp, Homo sapiens
  source 1..23: mol_type = other DNA
accatccttgcaagaataaagga

SEQ ID NO: 704 - DNA, 23 bp, Homo sapiens
  source 1..23: mol_type = other DNA
atcaaactgccaaaaatgagatg

SEQ ID NO: 705 - DNA, 22 bp, Homo sapiens
  source 1..22: mol_type = other DNA
cccatcctgtcagaatgactgg

SEQ ID NO: 706 - DNA, 22 bp, Homo sapiens
  source 1..22: mol_type = other DNA
cccatcctgcaacaatcagtgg

SEQ ID NO: 707 - DNA, 23 bp, Homo sapiens
  source 1..23: mol_type = other DNA
actttaatgccaagaatgaccgg

SEQ ID NO: 708 - DNA, 23 bp, Homo sapiens
  source 1..23: mol_type = other DNA
gccatcgtgcaaagaatgtgggc

SEQ ID NO: 709 - DNA, 22 bp, Homo sapiens
  source 1..22: mol_type = other DNA
gtcatctaccaagtatgagaga

SEQ ID NO: 710 - DNA, 23 bp, Homo sapiens
  source 1..23: mol_type = other DNA
gatctcctatcaagaaggagggg

SEQ ID NO: 711 - DNA, 22 bp, Homo sapiens
  source 1..22: mol_type = other DNA
gagacatgccaaggatgagagg

SEQ ID NO: 712 - DNA, 23 bp, Homo sapiens
  source 1..23: mol_type = other DNA
acaaacctgacaagaatgagcaa

SEQ ID NO: 713 - DNA, 23 bp, Homo sapiens
  source 1..23: mol_type = other DNA
aatttactgtcaagaatgagagg

SEQ ID NO: 714 - DNA, 23 bp, Homo sapiens
  source 1..23: mol_type = other DNA
gccatctctctaagaatgagtta

SEQ ID NO: 715 - DNA, 23 bp, Homo sapiens
  source 1..23: mol_type = other DNA
gccatcttgacaggaatgaggtg

SEQ ID NO: 716 - DNA, 22 bp, Homo sapiens
  source 1..22: mol_type = other DNA
gctatcctccaaaaatgaggaa

SEQ ID NO: 717 - DNA, 21 bp, Homo sapiens
  source 1..21: mol_type = other DNA
gccatcctgaagaaccagtgg

SEQ ID NO: 718 - DNA, 23 bp, Homo sapiens
  source 1..23: mol_type = other DNA
gccaccccgtcaaggatgtgagg

SEQ ID NO: 719 - DNA, 23 bp, Homo sapiens
  source 1..23: mol_type = other DNA
tccagtaagccaagaatgagggg

SEQ ID NO: 720 - DNA, 23 bp, Homo sapiens
  source 1..23: mol_type = other DNA
aatattttgccaagaatgagagg

SEQ ID NO: 721 - DNA, 23 bp, Homo sapiens
  source 1..23: mol_type = other DNA
accacactgccatgaatgagttt

SEQ ID NO: 722 - DNA, 23 bp, Homo sapiens
  source 1..23: mol_type = other DNA
gccatcctatgaagtatgaagtg

SEQ ID NO: 723 - DNA, 22 bp, Homo sapiens
  source 1..22: mol_type = other DNA
ggccaccttccaagaagagggg

SEQ ID NO: 724 - DNA, 22 bp, Homo sapiens
  source 1..22: mol_type = other DNA
gctaccataccaagaagagagg

SEQ ID NO: 725 - DNA, 21 bp, Homo sapiens
  source 1..21: mol_type = other DNA
gccatcctcaataatgaggat

SEQ ID NO: 726 - DNA, 21 bp, Homo sapiens
  source 1..21: mol_type = other DNA
actatcctgaagaattagtgg

SEQ ID NO: 727 - DNA, 23 bp, Homo sapiens
  source 1..23: mol_type = other DNA
tccatcccaccaagtatatgtgg

SEQ ID NO: 728 - DNA, 22 bp, Homo sapiens
  source 1..22: mol_type = other DNA
gccatatgccaaaaaggagtgg

SEQ ID NO: 729 - DNA, 21 bp, Homo sapiens
  source 1..21: mol_type = other DNA
gccaccctaaagaatgagcag

SEQ ID NO: 730 - DNA, 23 bp, Homo sapiens
  source 1..23: mol_type = other DNA
cctaccctgccaaggatgagggt

SEQ ID NO: 731 - DNA, 23 bp, Homo sapiens
  source 1..23: mol_type = other DNA
gccatcctaacaagtatgaggta

SEQ ID NO: 732 - DNA, 22 bp, Homo sapiens
  source 1..22: mol_type = other DNA
gccatcttgcaagcatgaggag

SEQ ID NO: 733 - DNA, 23 bp, Homo sapiens
  source 1..23: mol_type = other DNA
tatattctgccaagaatcagaag

SEQ ID NO: 734 - DNA, 23 bp, Homo sapiens
  source 1..23: mol_type = other DNA
accaccctgccaggaacaagagg

SEQ ID NO: 735 - DNA, 22 bp, Homo sapiens
  source 1..22: mol_type = other DNA
gccatccaccatgaatgtggag

SEQ ID NO: 736 - DNA, 21 bp, Homo sapiens
  source 1..21: mol_type = other DNA
gccattgccaagaacgagata

SEQ ID NO: 737 - DNA, 22 bp, Homo sapiens
  source 1..22: mol_type = other DNA
gacatcctaccagaatgaagag

SEQ ID NO: 738 - DNA, 22 bp, Homo sapiens
  source 1..22: mol_type = other DNA
ggcctactgcaagaatgaggag

SEQ ID NO: 739 - DNA, 23 bp, Homo sapiens
  source 1..23: mol_type = other DNA
accatcctgccaggattgaggag

SEQ ID NO: 740 - DNA, 21 bp, Homo sapiens
  source 1..21: mol_type = other DNA
gccattgccaagaatgacagt

SEQ ID NO: 741 - DNA, 22 bp, Homo sapiens
  source 1..22: mol_type = other DNA
gtcaccctgccaaaatgtgcgg

SEQ ID NO: 742 - DNA, 22 bp, Homo sapiens
  source 1..22: mol_type = other DNA
gccatcaagccaagaagagagg

SEQ ID NO: 743 - DNA, 21 bp, Homo sapiens
  source 1..21: mol_type = other DNA
tccatcttaccaagagagtgg

SEQ ID NO: 744 - DNA, 23 bp, Homo sapiens
  source 1..23: mol_type = other DNA
gctattctgtcaaggatatgagg

SEQ ID NO: 745 - DNA, 23 bp, Homo sapiens
  source 1..23: mol_type = other DNA
accttccagcaaagaatgagtgg

SEQ ID NO: 746 - DNA, 22 bp, Homo sapiens
  source 1..22: mol_type = other DNA
gccatcagccaagagtgaggat

SEQ ID NO: 747 - DNA, 25 bp, Homo sapiens
  source 1..25: mol_type = other DNA
gccatcctgcaaaatgaagaagtag

SEQ ID NO: 748 - DNA, 23 bp, Homo sapiens
  source 1..23: mol_type = other DNA
accatcctgccaaggaccagtga

SEQ ID NO: 749 - DNA, 23 bp, Homo sapiens
  source 1..23: mol_type = other DNA
accatccttacagtaatgaggga

SEQ ID NO: 750 - DNA, 23 bp, Homo sapiens
  source 1..23: mol_type = other DNA
gccatcctagtaagtatgaagtg

SEQ ID NO: 751 - DNA, 23 bp, Homo sapiens
  source 1..23: mol_type = other DNA
gttctcctaccaagaataaaggg

SEQ ID NO: 752 - DNA, 23 bp, Homo sapiens
  source 1..23: mol_type = other DNA
acccaaatgccaagaatgagaga

SEQ ID NO: 753 - DNA, 23 bp, Homo sapiens
  source 1..23: mol_type = other DNA
aaaatgctaccaaggatgagagg

SEQ ID NO: 754 - DNA, 23 bp, Homo sapiens
  source 1..23: mol_type = other DNA
ccactacttccaagaatgagtgc

SEQ ID NO: 755 - DNA, 22 bp, Homo sapiens
  source 1..22: mol_type = other DNA
tgcatcttgcaagaatgagtga

SEQ ID NO: 756 - DNA, 22 bp, Homo sapiens
  source 1..22: mol_type = other DNA
acaatcctgaaagaatgtgggg

SEQ ID NO: 757 - DNA, 22 bp, Homo sapiens
  source 1..22: mol_type = other DNA
cccatcctgccataatgtggag

SEQ ID NO: 758 - DNA, 23 bp, Homo sapiens
  source 1..23: mol_type = other DNA
gccattctgacaaatgtgaggtg

SEQ ID NO: 759 - DNA, 23 bp, Homo sapiens
  source 1..23: mol_type = other DNA
atcctcctaccaagaataactgg

SEQ ID NO: 760 - DNA, 21 bp, Homo sapiens
  source 1..21: mol_type = other DNA
tccatactgaagaatgaggag

SEQ ID NO: 761 - DNA, 23 bp, Homo sapiens
  source 1..23: mol_type = other DNA
tcagtcctgccaacaatgatggg

SEQ ID NO: 762 - DNA, 23 bp, Homo sapiens
  source 1..23: mol_type = other DNA
gccatcctagtaagtatgaggtg

SEQ ID NO: 763 - DNA, 23 bp, Homo sapiens
  source 1..23: mol_type = other DNA
aacatccagccaagaatgaggtt

SEQ ID NO: 764 - DNA, 23 bp, Homo sapiens
  source 1..23: mol_type = other DNA
gcttaactgccagaaatgagggg

SEQ ID NO: 765 - DNA, 24 bp, Homo sapiens
  source 1..24: mol_type = other DNA
gccttaatgccaaagaatgaacgg

SEQ ID NO: 766 - DNA, 23 bp, Homo sapiens
  source 1..23: mol_type = other DNA
gccattctgacaagtatgaggtg

SEQ ID NO: 767 - DNA, 23 bp, Homo sapiens
  source 1..23: mol_type = other DNA
aacatttagccaacaatgagtgg

SEQ ID NO: 768 - DNA, 21 bp, Homo sapiens
  source 1..21: mol_type = other DNA
gccactgccaagaatgttgag

SEQ ID NO: 769 - DNA, 22 bp, Homo sapiens
  source 1..22: mol_type = other DNA
accatcctgcaaccatgagtgg

SEQ ID NO: 770 - DNA, 22 bp, Homo sapiens
  source 1..22: mol_type = other DNA
gccatctgcaaagaaagagatg

SEQ ID NO: 771 - DNA, 22 bp, Homo sapiens
  source 1..22: mol_type = other DNA
gccatcctgctaagaagtgtga

SEQ ID NO: 772 - DNA, 23 bp, Homo sapiens
  source 1..23: mol_type = other DNA
gccatactgcaaagaattggagt

SEQ ID NO: 773 - DNA, 23 bp, Homo sapiens
  source 1..23: mol_type = other DNA
cctatcctgccaagaaaataagg

SEQ ID NO: 774 - DNA, 21 bp, Homo sapiens
  source 1..21: mol_type = other DNA
gccatcctcaagaatgggaaa

SEQ ID NO: 775 - DNA, 23 bp, Homo sapiens
  source 1..23: mol_type = other DNA
accatcctgtcaagaatcaagag

SEQ ID NO: 776 - DNA, 23 bp, Homo sapiens
  source 1..23: mol_type = other DNA
gacatcctgtcaaggatcagtgg

SEQ ID NO: 777 - DNA, 23 bp, Homo sapiens
  source 1..23: mol_type = other DNA
gtcatcctgccaggaatgaaaga

SEQ ID NO: 778 - DNA, 23 bp, Homo sapiens
  source 1..23: mol_type = other DNA
gatatcctaccaagaatcatggc

SEQ ID NO: 779 - DNA, 21 bp, Homo sapiens
  source 1..21: mol_type = other DNA
tccattctgccaaataagtgg

SEQ ID NO: 780 - DNA, 23 bp, Homo sapiens
  source 1..23: mol_type = other DNA
tccatccttccaagaagaagggg

SEQ ID NO: 781 - DNA, 23 bp, Homo sapiens
  source 1..23: mol_type = other DNA
gccatcctgacaaatgtgaggtt

SEQ ID NO: 782 - DNA, 23 bp, Homo sapiens
  source 1..23: mol_type = other DNA
aggatactgccaaggatgtgtgg

SEQ ID NO: 783 - DNA, 22 bp, Homo sapiens
  source 1..22: mol_type = other DNA
gccaccctggaagaatgagtga

SEQ ID NO: 784 - DNA, 22 bp, Homo sapiens
  source 1..22: mol_type = other DNA
accacatgccaacaatgagatg

SEQ ID NO: 785 - DNA, 23 bp, Homo sapiens
  source 1..23: mol_type = other DNA
gccaccctgccaatgagaagaag

SEQ ID NO: 786 - DNA, 23 bp, Homo sapiens
  source 1..23: mol_type = other DNA
gcatatctgccaaggataagggg

SEQ ID NO: 787 - DNA, 22 bp, Homo sapiens
  source 1..22: mol_type = other DNA
accattctccaagaatgaggtg

SEQ ID NO: 788 - DNA, 23 bp, Homo sapiens
  source 1..23: mol_type = other DNA
cacaccctgcccagaatgaggag

SEQ ID NO: 789 - DNA, 23 bp, Homo sapiens
  source 1..23: mol_type = other DNA
gccatcctgccttgagtgagagg

SEQ ID NO: 790 - DNA, 24 bp, Homo sapiens
  source 1..24: mol_type = other DNA
gaggtcctagccaaggatgagggg

SEQ ID NO: 791 - DNA, 23 bp, Homo sapiens
  source 1..23: mol_type = other DNA
gccatattggcaagaatgagaga

SEQ ID NO: 792 - DNA, 22 bp, Homo sapiens
  source 1..22: mol_type = other DNA
gtcatattgccaagaatagtgg

SEQ ID NO: 793 - DNA, 23 bp, Homo sapiens
  source 1..23: mol_type = other DNA
agctacctaccaagaaggagagg

SEQ ID NO: 794 - DNA, 22 bp, Homo sapiens
  source 1..22: mol_type = other DNA
tccatctaccaagaaagagaga

SEQ ID NO: 795 - DNA, 22 bp, Homo sapiens
  source 1..22: mol_type = other DNA
tacaacctgccagaatgatggg

SEQ ID NO: 796 - DNA, 22 bp, Homo sapiens
  source 1..22: mol_type = other DNA
ccaatcctccaagaataaaagg

SEQ ID NO: 797 - DNA, 23 bp, Homo sapiens
  source 1..23: mol_type = other DNA
cacatcatgcccagaatgatggg

SEQ ID NO: 798 - DNA, 23 bp, Homo sapiens
  source 1..23: mol_type = other DNA
tacattatgccaaaaatgaatgg

SEQ ID NO: 799 - DNA, 22 bp, Homo sapiens
  source 1..22: mol_type = other DNA
gccaaaagccaaggatgagggg

SEQ ID NO: 800 - DNA, 23 bp, Homo sapiens
  source 1..23: mol_type = other DNA
atcaccctgccaaaaatgaaggt

SEQ ID NO: 801 - DNA, 22 bp, Homo sapiens
  source 1..22: mol_type = other DNA
accatcagcaaagaatgagagt

SEQ ID NO: 802 - DNA, 23 bp, Homo sapiens
  source 1..23: mol_type = other DNA
gtcatactatcaaggatgaaagg

SEQ ID NO: 803 - DNA, 23 bp, Homo sapiens
  source 1..23: mol_type = other DNA
tccatcctaccaagaaccaggaa

SEQ ID NO: 804 - DNA, 23 bp, Homo sapiens
  source 1..23: mol_type = other DNA
gccatcctcccagtaatgagtga

SEQ ID NO: 805 - DNA, 23 bp, Homo sapiens
  source 1..23: mol_type = other DNA
accatcctcacaataatgagtga

SEQ ID NO: 806 - DNA, 21 bp, Homo sapiens
  source 1..21: mol_type = other DNA
gctattgccaaaaatgagggt

SEQ ID NO: 807 - DNA, 23 bp, Homo sapiens
  source 1..23: mol_type = other DNA
gctaccttaccaagaatgagaga

SEQ ID NO: 808 - DNA, 23 bp, Homo sapiens
  source 1..23: mol_type = other DNA
gacatcctgccaagaattagctt

SEQ ID NO: 809 - DNA, 23 bp, Homo sapiens
  source 1..23: mol_type = other DNA
cacatactaccaataatgagtga

SEQ ID NO: 810 - DNA, 22 bp, Homo sapiens
  source 1..22: mol_type = other DNA
gccattttgcaagaatgagaat

SEQ ID NO: 811 - DNA, 23 bp, Homo sapiens
  source 1..23: mol_type = other DNA
gccaaatagccaagaatgaaaga

SEQ ID NO: 812 - DNA, 21 bp, Homo sapiens
  source 1..21: mol_type = other DNA
gccatcctaacaggtgagagg

SEQ ID NO: 813 - DNA, 21 bp, Homo sapiens
  source 1..21: mol_type = other DNA
ggcaatgccaagaatgaaggg

SEQ ID NO: 814 - DNA, 23 bp, Homo sapiens
  source 1..23: mol_type = other DNA
aaaatccagccaagaatgaggta

SEQ ID NO: 815 - DNA, 22 bp, Homo sapiens
  source 1..22: mol_type = other DNA
atcatcctgacaaaatgtgagg

SEQ ID NO: 816 - DNA, 23 bp, Homo sapiens
  source 1..23: mol_type = other DNA
gggattctgacaagaatgttggg

SEQ ID NO: 817 - DNA, 23 bp, Homo sapiens
  source 1..23: mol_type = other DNA
gccatagtataaagaatgaatgg

SEQ ID NO: 818 - DNA, 23 bp, Homo sapiens
  source 1..23: mol_type = other DNA
gccatcccgccaggaattatagg

SEQ ID NO: 819 - DNA, 23 bp, Homo sapiens
  source 1..23: mol_type = other DNA
gccatatgccaaagaaagagtgg

SEQ ID NO: 820 - DNA, 23 bp, Homo sapiens
  source 1..23: mol_type = other DNA
gccatcccgccaaaaatgaaaga

SEQ ID NO: 821 - DNA, 23 bp, Homo sapiens
  source 1..23: mol_type = other DNA
aatatcctgccaagaaaatgggg

SEQ ID NO: 822 - DNA, 22 bp, Homo sapiens
  source 1..22: mol_type = other DNA
tccatccaccaagaatgaaagg

SEQ ID NO: 823 - DNA, 24 bp, Homo sapiens
  source 1..24: mol_type = other DNA
gccatcctaccacagaatgaggtt

SEQ ID NO: 824 - DNA, 23 bp, Homo sapiens
  source 1..23: mol_type = other DNA
gccatctggccaagtatgaagtg

SEQ ID NO: 825 - DNA, 21 bp, Homo sapiens
  source 1..21: mol_type = other DNA
gccatcccccaaaatgactgg

SEQ ID NO: 826 - DNA, 22 bp, Homo sapiens
  source 1..22: mol_type = other DNA
tccatataccaagaaggagagg

SEQ ID NO: 827 - DNA, 22 bp, Homo sapiens
  source 1..22: mol_type = other DNA
gttatctgccaagagtgaaggg

SEQ ID NO: 828 - DNA, 22 bp, Homo sapiens
  source 1..22: mol_type = other DNA
acaatcctgccatgaatagagg

SEQ ID NO: 829 - DNA, 22 bp, Homo sapiens
  source 1..22: mol_type = other DNA
ctcatcctccaagaatgaaagg

SEQ ID NO: 830 - DNA, 23 bp, Homo sapiens
  source 1..23: mol_type = other DNA
actctactgccaagaatgaggtt

SEQ ID NO: 831 - DNA, 23 bp, Homo sapiens
  source 1..23: mol_type = other DNA
tcatacctgccaagagcgagtgg

SEQ ID NO: 832 - DNA, 21 bp, Homo sapiens
  source 1..21: mol_type = other DNA
cccatccccaggaatgagagg

SEQ ID NO: 833 - DNA, 22 bp, Homo sapiens
  source 1..22: mol_type = other DNA
gccattggccaagaatgaggaa

SEQ ID NO: 834 - DNA, 22 bp, Homo sapiens
  source 1..22: mol_type = other DNA
actatccagccaagaagagcag

SEQ ID NO: 835 - DNA, 22 bp, Homo sapiens
  source 1..22: mol_type = other DNA
tccaccctaccaaggatagagg

SEQ ID NO: 836 - DNA, 23 bp, Homo sapiens
  source 1..23: mol_type = other DNA
cccatccaagaaagaatgtgagg

SEQ ID NO: 837 - DNA, 21 bp, Homo sapiens
  source 1..21: mol_type = other DNA
accatccagccaaatgattgg

SEQ ID NO: 838 - DNA, 23 bp, Homo sapiens
  source 1..23: mol_type = other DNA
gcttccatgccaagaataaggga

SEQ ID NO: 839 - DNA, 23 bp, Homo sapiens
  source 1..23: mol_type = other DNA
cctaccctgcaagaaatgagagg

SEQ ID NO: 840 - DNA, 23 bp, Homo sapiens
  source 1..23: mol_type = other DNA
gccatcctccaagaaaaaagggg

SEQ ID NO: 841 - DNA, 21 bp, Homo sapiens
  source 1..21: mol_type = other DNA
gccatcctgcctattgagtgg

SEQ ID NO: 842 - DNA, 21 bp, Homo sapiens
  source 1..21: mol_type = other DNA
gccaacctgacaaatgtgagg

SEQ ID NO: 843 - DNA, 23 bp, Homo sapiens
  source 1..23: mol_type = other DNA
accatccttccaagaagatgggg

SEQ ID NO: 844 - DNA, 23 bp, Homo sapiens
  source 1..23: mol_type = other DNA
cccatcctgccaagagccagcgg

SEQ ID NO: 845 - DNA, 22 bp, Homo sapiens
  source 1..22: mol_type = other DNA
gccatcctaacaaaatgtgagg

SEQ ID NO: 846 - DNA, 22 bp, Homo sapiens
  source 1..22: mol_type = other DNA
ttcatccaccaagaatgagaga

SEQ ID NO: 847 - DNA, 23 bp, Homo sapiens
  source 1..23: mol_type = other DNA
gccatcctaacaggaatgaaatg

SEQ ID NO: 848 - DNA, 24 bp, Homo sapiens
  source 1..24: mol_type = other DNA
tccatccctaccatgaatcagtgg

SEQ ID NO: 849 - DNA, 23 bp, Homo sapiens
  source 1..23: mol_type = other DNA
gacttcctaccaagaatgaagtg

SEQ ID NO: 850 - DNA, 21 bp, Homo sapiens
  source 1..21: mol_type = other DNA
gccattagcaagaaggagagg

SEQ ID NO: 851 - DNA, 23 bp, Homo sapiens
  source 1..23: mol_type = other DNA
gccattctgccatcaatgaggtg

SEQ ID NO: 852 - DNA, 23 bp, Homo sapiens
  source 1..23: mol_type = other DNA
ttaatcctacaaagaatgagaag

SEQ ID NO: 853 - DNA, 22 bp, Homo sapiens
  source 1..22: mol_type = other DNA
gccagatgccaggaatgagagg

SEQ ID NO: 854 - DNA, 24 bp, Homo sapiens
  source 1..24: mol_type = other DNA
gccatcctagccaaggatgagaaa

SEQ ID NO: 855 - DNA, 23 bp, Homo sapiens
  source 1..23: mol_type = other DNA
gccttcctaccaaggatgatgca

SEQ ID NO: 856 - DNA, 22 bp, Homo sapiens
  source 1..22: mol_type = other DNA
gatatccttccagaatgaaggg

SEQ ID NO: 857 - DNA, 22 bp, Homo sapiens
  source 1..22: mol_type = other DNA
gccatccaaacaagaaaagagg

SEQ ID NO: 858 - DNA, 23 bp, Homo sapiens
  source 1..23: mol_type = other DNA
tgcaatctgccaagaatgagttg

SEQ ID NO: 859 - DNA, 23 bp, Homo sapiens
  source 1..23: mol_type = other DNA
caaatcctgcaaagaatgaaacg

SEQ ID NO: 860 - DNA, 23 bp, Homo sapiens
  source 1..23: mol_type = other DNA
cccatcatgccaggaatggggtg

SEQ ID NO: 861 - DNA, 22 bp, Homo sapiens
  source 1..22: mol_type = other DNA
gccaacagccaagagtgaggtg

SEQ ID NO: 862 - DNA, 22 bp, Homo sapiens
  source 1..22: mol_type = other DNA
tccacactgaaagaatgagagg

SEQ ID NO: 863 - DNA, 23 bp, Homo sapiens
  source 1..23: mol_type = other DNA
gtgatccttccaagaatgaagaa

SEQ ID NO: 864 - DNA, 23 bp, Homo sapiens
  source 1..23: mol_type = other DNA
tagagcctgtcaagaatgagggg

SEQ ID NO: 865 - DNA, 23 bp, Homo sapiens
  source 1..23: mol_type = other DNA
gccaacctcccaagaatgggttt

SEQ ID NO: 866 - DNA, 22 bp, Homo sapiens
  source 1..22: mol_type = other DNA
accatccagcaaagaagagaag

SEQ ID NO: 867 - DNA, 22 bp, Homo sapiens
  source 1..22: mol_type = other DNA
gccatcctccaggaataagaga

SEQ ID NO: 868 - DNA, 22 bp, Homo sapiens
  source 1..22: mol_type = other DNA
tgcatcctccaaggataagggg

SEQ ID NO: 869 - DNA, 22 bp, Homo sapiens
  source 1..22: mol_type = other DNA
gccatcagccaagaatcacagc

SEQ ID NO: 870 - DNA, 22 bp, Homo sapiens
  source 1..22: mol_type = other DNA
gccacctaccaagaagaagaga

SEQ ID NO: 871 - DNA, 22 bp, Homo sapiens
  source 1..22: mol_type = other DNA
gacatcctgccagaacaagggc

SEQ ID NO: 872 - DNA, 22 bp, Homo sapiens
  source 1..22: mol_type = other DNA
gccatcctccaagaatgctggg

SEQ ID NO: 873 - DNA, 23 bp, Homo sapiens
  source 1..23: mol_type = other DNA
gccatattgccaagaatgatgag

SEQ ID NO: 874 - DNA, 23 bp, Homo sapiens
  source 1..23: mol_type = other DNA
gccatcctgctaagtatgcagtg

SEQ ID NO: 875 - DNA, 23 bp, Homo sapiens
  source 1..23: mol_type = other DNA
accatcctgtaaagaatgatgaa

SEQ ID NO: 876 - DNA, 23 bp, Homo sapiens
  source 1..23: mol_type = other DNA
gccatgcagccaagaataaggtg

SEQ ID NO: 877 - DNA, 22 bp, Homo sapiens
  source 1..22: mol_type = other DNA
gccatccttacaagaagagaag

SEQ ID NO: 878 - DNA, 21 bp, Homo sapiens
  source 1..21: mol_type = other DNA
gccatcctgccaggtgagtgg

SEQ ID NO: 879 - DNA, 23 bp, Homo sapiens
  source 1..23: mol_type = other DNA
acattattgccaagtatgagggg

SEQ ID NO: 880 - DNA, 22 bp, Homo sapiens
  source 1..22: mol_type = other DNA
atcatctgccgagaatgaggtg

SEQ ID NO: 881 - DNA, 22 bp, Homo sapiens
  source 1..22: mol_type = other DNA
tttatcctgccaagatgagttg

SEQ ID NO: 882 - DNA, 23 bp, Homo sapiens
  source 1..23: mol_type = other DNA
gtcatccagccgagaatgggagg

SEQ ID NO: 883 - DNA, 23 bp, Homo sapiens
  source 1..23: mol_type = other DNA
gactcactgacaagaatgagaag

SEQ ID NO: 884 - DNA, 23 bp, Homo sapiens
  source 1..23: mol_type = other DNA
gccaacctaccaagaatgaagct

SEQ ID NO: 885 - DNA, 22 bp, Homo sapiens
  source 1..22: mol_type = other DNA
gtcatccctcaaggatgagagg

SEQ ID NO: 886 - DNA, 24 bp, Homo sapiens
  source 1..24: mol_type = other DNA
gccatcctgccagaagatgaagcg

SEQ ID NO: 887 - DNA, 23 bp, Homo sapiens
  source 1..23: mol_type = other DNA
gccatcctgcaaggaatgaggac

SEQ ID NO: 888 - DNA, 23 bp, Homo sapiens
  source 1..23: mol_type = other DNA
gggatcctgccagaaatgagggg

SEQ ID NO: 889 - DNA, 23 bp, Homo sapiens
  source 1..23: mol_type = other DNA
accatccagctatgaatgactgg

SEQ ID NO: 890 - DNA, 23 bp, Homo sapiens
  source 1..23: mol_type = other DNA
gccatccagccaagcaagaaggg

SEQ ID NO: 891 - DNA, 24 bp, Homo sapiens
  source 1..24: mol_type = other DNA
gtcatcactgccaagaacaagagg

SEQ ID NO: 892 - DNA, 23 bp, Homo sapiens
  source 1..23: mol_type = other DNA
ctattcctgccaagaatgcatgg

SEQ ID NO: 893 - DNA, 23 bp, Homo sapiens
  source 1..23: mol_type = other DNA
ttcatcctgccaagagtgagctg

SEQ ID NO: 894 - DNA, 22 bp, Homo sapiens
  source 1..22: mol_type = other DNA
gccatcctgctaaaatcagggg

SEQ ID NO: 895 - DNA, 24 bp, Homo sapiens
  source 1..24: mol_type = other DNA
cccatcactgccaagaaagaggga

SEQ ID NO: 896 - DNA, 22 bp, Homo sapiens
  source 1..22: mol_type = other DNA
gccacactgccagaatgagaag

SEQ ID NO: 897 - DNA, 23 bp, Homo sapiens
  source 1..23: mol_type = other DNA
atactcctgccaaaaatgattgg

SEQ ID NO: 898 - DNA, 22 bp, Homo sapiens
  source 1..22: mol_type = other DNA
accatccttcaggaatgaaggg

SEQ ID NO: 899 - DNA, 23 bp, Homo sapiens
  source 1..23: mol_type = other DNA
gccatgctgccaagaatactgga

SEQ ID NO: 900 - DNA, 23 bp, Homo sapiens
  source 1..23: mol_type = other DNA
gccatcctgccagagaagaggcc

SEQ ID NO: 901 - DNA, 22 bp, Homo sapiens
  source 1..22: mol_type = other DNA
accacactgccaaaataagagg

SEQ ID NO: 902 - DNA, 22 bp, Homo sapiens
  source 1..22: mol_type = other DNA
gccatcctgaaagaaagaggga

SEQ ID NO: 903 - DNA, 22 bp, Homo sapiens
  source 1..22: mol_type = other DNA
gccacactggaagaatgagagg

SEQ ID NO: 904 - DNA, 22 bp, Homo sapiens
  source 1..22: mol_type = other DNA
accatcctctaagaataagaga

SEQ ID NO: 905 - DNA, 23 bp, Homo sapiens
  source 1..23: mol_type = other DNA
tccattctaccaagaaagaggta

SEQ ID NO: 906 - DNA, 24 bp, Homo sapiens
  source 1..24: mol_type = other DNA
gccatccagccaggagatgagagg

SEQ ID NO: 907 - DNA, 23 bp, Homo sapiens
  source 1..23: mol_type = other DNA
gccatccttgaagtaatgagtgg

SEQ ID NO: 908 - DNA, 22 bp, Homo sapiens
  source 1..22: mol_type = other DNA
gccaccatccaagaatgagaga

SEQ ID NO: 909 - DNA, 23 bp, Homo sapiens
  source 1..23: mol_type = other DNA
accaacctgccaggcatgtgggt

SEQ ID NO: 910 - DNA, 23 bp, Homo sapiens
  source 1..23: mol_type = other DNA
gccatcctaacaagtgtgaggga

SEQ ID NO: 911 - DNA, 23 bp, Homo sapiens
  source 1..23: mol_type = other DNA
ggaattatgccaagattgaggag

SEQ ID NO: 912 - DNA, 21 bp, Homo sapiens
  source 1..21: mol_type = other DNA
gccatcctgtcgtatgagaag

SEQ ID NO: 913 - DNA, 21 bp, Homo sapiens
  source 1..21: mol_type = other DNA
gccatcccgaagaatgagcag

SEQ ID NO: 914 - DNA, 22 bp, Homo sapiens
  source 1..22: mol_type = other DNA
gctatatgctaagaatgtgagg

SEQ ID NO: 915 - DNA, 23 bp, Homo sapiens
  source 1..23: mol_type = other DNA
gccatcctgataagtatgaggtg

SEQ ID NO: 916 - DNA, 23 bp, Homo sapiens
  source 1..23: mol_type = other DNA
ttcttcctaccaaaaatgagaga

SEQ ID NO: 917 - DNA, 23 bp, Homo sapiens
  source 1..23: mol_type = other DNA
gctatactgctaagaatgttagg

SEQ ID NO: 918 - DNA, 23 bp, Homo sapiens
  source 1..23: mol_type = other DNA
gccatcaagccaagaataaagtg

SEQ ID NO: 919 - DNA, 24 bp, Homo sapiens
  source 1..24: mol_type = other DNA
gccatcctgctaagagatgtggaa

SEQ ID NO: 920 - DNA, 22 bp, Homo sapiens
  source 1..22: mol_type = other DNA
agcaccctgccaagaagagcag

SEQ ID NO: 921 - DNA, 22 bp, Homo sapiens
  source 1..22: mol_type = other DNA
gccacctgctaaggatgagaga

SEQ ID NO: 922 - DNA, 23 bp, Homo sapiens
  source 1..23: mol_type = other DNA
gctatccttccaaaaatgaagga

SEQ ID NO: 923 - DNA, 23 bp, Homo sapiens
  source 1..23: mol_type = other DNA
gccatcctaacaagtgagaggtg

SEQ ID NO: 924 - DNA, 22 bp, Homo sapiens
  source 1..22: mol_type = other DNA
gccatcagccagggatgtgtgg

SEQ ID NO: 925 - DNA, 23 bp, Homo sapiens
  source 1..23: mol_type = other DNA
gccatcccccaaaggatgagtag

SEQ ID NO: 926 - DNA, 23 bp, Homo sapiens
  source 1..23: mol_type = other DNA
accatcctgacaggtatgaggtg

SEQ ID NO: 927 - DNA, 22 bp, Homo sapiens
  source 1..22: mol_type = other DNA
gccaccctgacaaaataagagg

SEQ ID NO: 928 - DNA, 23 bp, Homo sapiens
  source 1..23: mol_type = other DNA
ggggtcctaccaagaaagaggtg

SEQ ID NO: 929 - DNA, 22 bp, Homo sapiens
  source 1..22: mol_type = other DNA
aacatcctccaagaatgaagag

SEQ ID NO: 930 - DNA, 22 bp, Homo sapiens
  source 1..22: mol_type = other DNA
tgcatccaggaagaatgagagg

SEQ ID NO: 931 - DNA, 23 bp, Homo sapiens
  source 1..23: mol_type = other DNA
agcaacctgccaaaaatgagaag

SEQ ID NO: 932 - DNA, 23 bp, Homo sapiens
  source 1..23: mol_type = other DNA
gcaacatagccaagaatgagcag

SEQ ID NO: 933 - DNA, 23 bp, Homo sapiens
  source 1..23: mol_type = other DNA
gcggtccttacaagtatgaggtg

SEQ ID NO: 934 - DNA, 23 bp, Homo sapiens
  source 1..23: mol_type = other DNA
gtgatattgccaagagtgaggtg

SEQ ID NO: 935 - DNA, 24 bp, Homo sapiens
  source 1..24: mol_type = other DNA
tccatctctgtcaacaatgaggtg

SEQ ID NO: 936 - DNA, 23 bp, Homo sapiens
  source 1..23: mol_type = other DNA
tctatattgccaaaaatgatagg

SEQ ID NO: 937 - DNA, 24 bp, Homo sapiens
  source 1..24: mol_type = other DNA
gtcatcctatccaagaatgagccg

SEQ ID NO: 938 - DNA, 23 bp, Homo sapiens
  source 1..23: mol_type = other DNA
acccttatgccaagaatgagttc

SEQ ID NO: 939 - DNA, 21 bp, Homo sapiens
  source 1..21: mol_type = other DNA
atcatcctgcagaattagtgg

SEQ ID NO: 940 - DNA, 23 bp, Homo sapiens
  source 1..23: mol_type = other DNA
cccatcctgccaagagacaaggg

SEQ ID NO: 941 - DNA, 22 bp, Homo sapiens
  source 1..22: mol_type = other DNA
gccatcctgtaagaataaggat

SEQ ID NO: 942 - DNA, 23 bp, Homo sapiens
  source 1..23: mol_type = other DNA
accatcctgccagcaatgtgagg

SEQ ID NO: 943 - DNA, 21 bp, Homo sapiens
  source 1..21: mol_type = other DNA
gccatccaaaaggatgagagg

SEQ ID NO: 944 - DNA, 23 bp, Homo sapiens
  source 1..23: mol_type = other DNA
ttcatcctgccaagagtgggggg

SEQ ID NO: 945 - DNA, 23 bp, Homo sapiens
  source 1..23: mol_type = other DNA
cctatcctgctaggaatgtgtgg

SEQ ID NO: 946 - DNA, 23 bp, Homo sapiens
  source 1..23: mol_type = other DNA
ctcatcctgccaagatggaaggg

SEQ ID NO: 947 - DNA, 23 bp, Homo sapiens
  source 1..23: mol_type = other DNA
gaccatatgcccagaatgagtgg

SEQ ID NO: 948 - DNA, 23 bp, Homo sapiens
  source 1..23: mol_type = other DNA
tcacatctgccaaggatgagggg

SEQ ID NO: 949 - DNA, 21 bp, Homo sapiens
  source 1..21: mol_type = other DNA
gccaccctcccaaatcagggg

SEQ ID NO: 950 - DNA, 21 bp, Homo sapiens
  source 1..21: mol_type = other DNA
tcccctactaagaatgagggg

SEQ ID NO: 951 - DNA, 22 bp, Homo sapiens
  source 1..22: mol_type = other DNA
gtcatctgccaagaatgactga

SEQ ID NO: 952 - DNA, 21 bp, Homo sapiens
  source 1..21: mol_type = other DNA
gccacactcaagaatgaggtg

SEQ ID NO: 953 - DNA, 22 bp, Homo sapiens
  source 1..22: mol_type = other DNA
aggatcctgccaaaatgaggtg

SEQ ID NO: 954 - DNA, 23 bp, Homo sapiens
  source 1..23: mol_type = other DNA
gccatcctatcaagtgtgaagtg

SEQ ID NO: 955 - DNA, 22 bp, Homo sapiens
  source 1..22: mol_type = other DNA
gactcctgtcaaaaatgagaag

SEQ ID NO: 956 - DNA, 23 bp, Homo sapiens
  source 1..23: mol_type = other DNA
cccatcctgtaatgaatgacagg

SEQ ID NO: 957 - DNA, 22 bp, Homo sapiens
  source 1..22: mol_type = other DNA
tccaactgtcaggaatgagtgg

SEQ ID NO: 958 - DNA, 23 bp, Homo sapiens
  source 1..23: mol_type = other DNA
gacatggtatcaagaatgaggag

SEQ ID NO: 959 - DNA, 23 bp, Homo sapiens
  source 1..23: mol_type = other DNA
atcatcctgccaagtgaaagagg

SEQ ID NO: 960 - DNA, 23 bp, Homo sapiens
  source 1..23: mol_type = other DNA
tcctttatgccaagaaggagtgg

SEQ ID NO: 961 - DNA, 23 bp, Homo sapiens
  source 1..23: mol_type = other DNA
tccatcctgccaaaaagtaagtg

SEQ ID NO: 962 - DNA, 23 bp, Homo sapiens
  source 1..23: mol_type = other DNA
gccatccatgcaaaaatgtgagg

SEQ ID NO: 963 - DNA, 23 bp, Homo sapiens
  source 1..23: mol_type = other DNA
gccatccagccatcaatgagagg

SEQ ID NO: 964 - DNA, 22 bp, Homo sapiens
  source 1..22: mol_type = other DNA
cccatcccccaaaaatgagtgg

SEQ ID NO: 965 - DNA, 23 bp, Homo sapiens
  source 1..23: mol_type = other DNA
gccatcctgagaagaagaagggg

SEQ ID NO: 966 - DNA, 23 bp, Homo sapiens
  source 1..23: mol_type = other DNA
accatcctgccaagcatgtgagc

SEQ ID NO: 967 - DNA, 23 bp, Homo sapiens
  source 1..23: mol_type = other DNA
tccctcctgacaagaatgaaagg

SEQ ID NO: 968 - DNA, 23 bp, Homo sapiens
  source 1..23: mol_type = other DNA
gccatcctgtcatgaattagggc

SEQ ID NO: 969 - DNA, 23 bp, Homo sapiens
  source 1..23: mol_type = other DNA
ggtcccctaccaagaaggagagg

SEQ ID NO: 970 - DNA, 21 bp, Homo sapiens
  source 1..21: mol_type = other DNA
gccatcctaaaaaatgtgtgg

SEQ ID NO: 971 - DNA, 22 bp, Homo sapiens
  source 1..22: mol_type = other DNA
tgcagcctgcaagaatgagtgg

SEQ ID NO: 972 - DNA, 23 bp, Homo sapiens
  source 1..23: mol_type = other DNA
agcatcctgcctagaatgtgctg

SEQ ID NO: 973 - DNA, 23 bp, Homo sapiens
  source 1..23: mol_type = other DNA
gtccccctaccaagaatgagcac

SEQ ID NO: 974 - DNA, 23 bp, Homo sapiens
  source 1..23: mol_type = other DNA
cccatactgccaagaaatgtcgg

SEQ ID NO: 975 - DNA, 22 bp, Homo sapiens
  source 1..22: mol_type = other DNA
accatcctcaaagtatgagtgc

SEQ ID NO: 976 - DNA, 23 bp, Homo sapiens
  source 1..23: mol_type = other DNA
tgcttcctaccaagaataacagg

SEQ ID NO: 977 - DNA, 23 bp, Homo sapiens
  source 1..23: mol_type = other DNA
ccacacctgccaagaatgagcca

SEQ ID NO: 978 - DNA, 21 bp, Homo sapiens
  source 1..21: mol_type = other DNA
ggcactgccaggaatgagcag

SEQ ID NO: 979 - DNA, 23 bp, Homo sapiens
  source 1..23: mol_type = other DNA
tccattctgtcaagaatggtggg

SEQ ID NO: 980 - DNA, 21 bp, Homo sapiens
  source 1..21: mol_type = other DNA
tccaccttcaagaatgagggg

SEQ ID NO: 981 - DNA, 22 bp, Homo sapiens
  source 1..22: mol_type = other DNA
gccaactgccaggaaggagagg

SEQ ID NO: 982 - DNA, 21 bp, Homo sapiens
  source 1..21: mol_type = other DNA
ttcatcctcaagaatgaggtg

SEQ ID NO: 983 - DNA, 22 bp, Homo sapiens
  source 1..22: mol_type = other DNA
gacaccctgccataatgagggg

SEQ ID NO: 984 - DNA, 22 bp, Homo sapiens
  source 1..22: mol_type = other DNA
gccaacctgcaagagtgaaatg

SEQ ID NO: 985 - DNA, 22 bp, Homo sapiens
  source 1..22: mol_type = other DNA
gccaccctccaagaatgcgcgt

SEQ ID NO: 986 - DNA, 21 bp, Homo sapiens
  source 1..21: mol_type = other DNA
tccatcctgaagaatgaatag

SEQ ID NO: 987 - DNA, 24 bp, Homo sapiens
  source 1..24: mol_type = other DNA
gccatatctgccaagaatgcggag

SEQ ID NO: 988 - DNA, 21 bp, Homo sapiens
  source 1..21: mol_type = other DNA
gacactgacaagaatgatggg

SEQ ID NO: 989 - DNA, 23 bp, Homo sapiens
  source 1..23: mol_type = other DNA
atatttctgccaagaatgagaga

SEQ ID NO: 990 - DNA, 23 bp, Homo sapiens
  source 1..23: mol_type = other DNA
gctaccctgccagaaataagcgg

SEQ ID NO: 991 - DNA, 24 bp, Homo sapiens
  source 1..24: mol_type = other DNA
gacttccatgccaagaatgggtga

SEQ ID NO: 992 - DNA, 21 bp, Homo sapiens
  source 1..21: mol_type = other DNA
gcccatgccaacaatgatggg

SEQ ID NO: 993 - DNA, 22 bp, Homo sapiens
  source 1..22: mol_type = other DNA
gccacaggctaagaatgagtga

SEQ ID NO: 994 - DNA, 24 bp, Homo sapiens
  source 1..24: mol_type = other DNA
gaaatcctagccaaggatgaaggg

SEQ ID NO: 995 - DNA, 23 bp, Homo sapiens
  source 1..23: mol_type = other DNA
gacctactaccaaggatgagagc

SEQ ID NO: 996 - DNA, 22 bp, Homo sapiens
  source 1..22: mol_type = other DNA
tttatcctccaagaatgggagg

SEQ ID NO: 997 - DNA, 22 bp, Homo sapiens
  source 1..22: mol_type = other DNA
gccatcctgcaaatatgagaag

SEQ ID NO: 998 - DNA, 23 bp, Homo sapiens
  source 1..23: mol_type = other DNA
gccatgctgccaagaatgatggc

SEQ ID NO: 999 - DNA, 22 bp, Homo sapiens
  source 1..22: mol_type = other DNA
accatctgtcaagaatgagggc

SEQ ID NO: 1000 - DNA, 23 bp, Homo sapiens
  source 1..23: mol_type = other DNA
agtatcctgccaggaagaagggg

SEQ ID NO: 1001 - DNA, 23 bp, Homo sapiens
  source 1..23: mol_type = other DNA
cttttactgccaagaatgaaggg

SEQ ID NO: 1002 - DNA, 23 bp, Homo sapiens
  source 1..23: mol_type = other DNA
cagctcctactaagaatgagagg

SEQ ID NO: 1003 - DNA, 23 bp, Homo sapiens
  source 1..23: mol_type = other DNA
agccacctgccaagaaagaaagg

SEQ ID NO: 1004 - DNA, 23 bp, Homo sapiens
  source 1..23: mol_type = other DNA
gccatcataccaagaatgacttg

SEQ ID NO: 1005 - DNA, 21 bp, Homo sapiens
  source 1..21: mol_type = other DNA
cccatctccaagaatgaatgg

SEQ ID NO: 1006 - DNA, 23 bp, Homo sapiens
  source 1..23: mol_type = other DNA
tccttagtgccaagaatgaatgg

SEQ ID NO: 1007 - DNA, 23 bp, Homo sapiens
  source 1..23: mol_type = other DNA
gacttcataccaaggatgatggg

SEQ ID NO: 1008 - DNA, 24 bp, Homo sapiens
  source 1..24: mol_type = other DNA
gccatccttaacaagaatgaggca

SEQ ID NO: 1009 - DNA, 23 bp, Homo sapiens
  source 1..23: mol_type = other DNA
gatatcctcacaagaatgagtga

SEQ ID NO: 1010 - DNA, 23 bp, Homo sapiens
  source 1..23: mol_type = other DNA
tgcatcctgccaagaagaagaag

SEQ ID NO: 1011 - DNA, 21 bp, Homo sapiens
  source 1..21: mol_type = other DNA
gccatctgcaagaatgagctg

SEQ ID NO: 1012 - DNA, 21 bp, Homo sapiens
  source 1..21: mol_type = other DNA
gccatagccaaaaatgaatgg

SEQ ID NO: 1013 - DNA, 22 bp, Homo sapiens
  source 1..22: mol_type = other DNA
catatcctgccagaatgaggga

SEQ ID NO: 1014 - DNA, 24 bp, Homo sapiens
  source 1..24: mol_type = other DNA
tacatcctaccaaggaatcagagg

SEQ ID NO: 1015 - DNA, 23 bp, Homo sapiens
  source 1..23: mol_type = other DNA
catatcctgccaagaatgctgag

SEQ ID NO: 1016 - DNA, 23 bp, Homo sapiens
  source 1..23: mol_type = other DNA
tacatcctaccaagaatgaacca

SEQ ID NO: 1017 - DNA, 23 bp, Homo sapiens
  source 1..23: mol_type = other DNA
tgcatcctgccaggaatggagag

SEQ ID NO: 1018 - DNA, 23 bp, Homo sapiens
  source 1..23: mol_type = other DNA
ctaatcctgcaaagaatgatggt

SEQ ID NO: 1019 - DNA, 21 bp, Homo sapiens
  source 1..21: mol_type = other DNA
gccactgccaggaatgtgtgg

SEQ ID NO: 1020 - DNA, 23 bp, Homo sapiens
  source 1..23: mol_type = other DNA
ttcatactgccaagaatgacagg

SEQ ID NO: 1021 - DNA, 22 bp, Homo sapiens
  source 1..22: mol_type = other DNA
cacatcctgtcaagaagagggg

SEQ ID NO: 1022 - DNA, 22 bp, Homo sapiens
  source 1..22: mol_type = other DNA
accatccttcaaaaatgaaggg

SEQ ID NO: 1023 - DNA, 22 bp, Homo sapiens
  source 1..22: mol_type = other DNA
accatctaccaagcatgggtgg

SEQ ID NO: 1024 - DNA, 23 bp, Homo sapiens
  source 1..23: mol_type = other DNA
gccatcctaacaagagagaggtg

SEQ ID NO: 1025 - DNA, 23 bp, Homo sapiens
  source 1..23: mol_type = other DNA
gccattctaacaagaatgaggtg

SEQ ID NO: 1026 - DNA, 23 bp, Homo sapiens
  source 1..23: mol_type = other DNA
aacatccagccaaggatgagtga

SEQ ID NO: 1027 - DNA, 22 bp, Homo sapiens
  source 1..22: mol_type = other DNA
accctctaccatgaatgagagg

SEQ ID NO: 1028 - DNA, 23 bp, Homo sapiens
  source 1..23: mol_type = other DNA
gccatcctaccaagtaggaggtg

SEQ ID NO: 1029 - DNA, 23 bp, Homo sapiens
  source 1..23: mol_type = other DNA
accatcctaacaagtatgagatg

SEQ ID NO: 1030 - DNA, 22 bp, Homo sapiens
  source 1..22: mol_type = other DNA
accatccttcaaaaatgagaga

SEQ ID NO: 1031 - DNA, 23 bp, Homo sapiens
  source 1..23: mol_type = other DNA
gtgcttctaccaagaatgatagg

SEQ ID NO: 1032 - DNA, 21 bp, Homo sapiens
  source 1..21: mol_type = other DNA
gccatccaaaaggatgagggg

SEQ ID NO: 1033 - DNA, 22 bp, Homo sapiens
  source 1..22: mol_type = other DNA
gctatctaccaagaatgagagc

SEQ ID NO: 1034 - DNA, 21 bp, Homo sapiens
  source 1..21: mol_type = other DNA
gccatcttccagaatgagcag

SEQ ID NO: 1035 - DNA, 23 bp, Homo sapiens
  source 1..23: mol_type = other DNA
gccatcctgttaggaatgcagtg

SEQ ID NO: 1036 - DNA, 23 bp, Homo sapiens
  source 1..23: mol_type = other DNA
gccaccctgccaagtaggggtga

SEQ ID NO: 1037 - DNA, 23 bp, Homo sapiens
  source 1..23: mol_type = other DNA
tacatcctgccaagattgaaatg

SEQ ID NO: 1038 - DNA, 23 bp, Homo sapiens
  source 1..23: mol_type = other DNA
ttcatattgccaagaatgacagg

SEQ ID NO: 1039 - DNA, 23 bp, Homo sapiens
  source 1..23: mol_type = other DNA
cccactctgccaagtatgagagg

SEQ ID NO: 1040 - DNA, 23 bp, Homo sapiens
  source 1..23: mol_type = other DNA
gagtttatgccaagaatgagggt

SEQ ID NO: 1041 - DNA, 23 bp, Homo sapiens
  source 1..23: mol_type = other DNA
gccattcttacaagaataaggtg

SEQ ID NO: 1042 - DNA, 23 bp, Homo sapiens
  source 1..23: mol_type = other DNA
aggaacctaccaagaatgtgagg

SEQ ID NO: 1043 - DNA, 22 bp, Homo sapiens
  source 1..22: mol_type = other DNA
gagatcctgccaaaatgtgtgg

SEQ ID NO: 1044 - DNA, 23 bp, Homo sapiens
  source 1..23: mol_type = other DNA
ctaatcctgacaaggatgtgggg

SEQ ID NO: 1045 - DNA, 23 bp, Homo sapiens
  source 1..23: mol_type = other DNA
tccatccttccaagaatatgcag

SEQ ID NO: 1046 - DNA, 23 bp, Homo sapiens
  source 1..23: mol_type = other DNA
gccatcccaccaggaatgtcagg

SEQ ID NO: 1047 - DNA, 23 bp, Homo sapiens
  source 1..23: mol_type = other DNA
gagatcctaccaagaattgggag

SEQ ID NO: 1048 - DNA, 23 bp, Homo sapiens
  source 1..23: mol_type = other DNA
gccataccatcaataatgaaggg

SEQ ID NO: 1049 - DNA, 21 bp, Homo sapiens
  source 1..21: mol_type = other DNA
tccatccagccaaatgattgg

SEQ ID NO: 1050 - DNA, 23 bp, Homo sapiens
  source 1..23: mol_type = other DNA
gaggtaatgccaagaatgagtag

SEQ ID NO: 1051 - DNA, 22 bp, Homo sapiens
  source 1..22: mol_type = other DNA
accatcagctaagaatgaaagg

SEQ ID NO: 1052 - DNA, 23 bp, Homo sapiens
  source 1..23: mol_type = other DNA
gtataccttccaagaatgagtag

SEQ ID NO: 1053 - DNA, 22 bp, Homo sapiens
  source 1..22: mol_type = other DNA
gtcatccagaaaggatgagggg

SEQ ID NO: 1054 - DNA, 22 bp, Homo sapiens
  source 1..22: mol_type = other DNA
cacatccttgaagaatgagagg

SEQ ID NO: 1055 - DNA, 22 bp, Homo sapiens
  source 1..22: mol_type = other DNA
gccaccctgccagaaagaggag

SEQ ID NO: 1056 - DNA, 22 bp, Homo sapiens
  source 1..22: mol_type = other DNA
gacatccaccaagaaagagggg

SEQ ID NO: 1057 - DNA, 21 bp, Homo sapiens
  source 1..21: mol_type = other DNA
gcaatcatgaggaatgagggg

SEQ ID NO: 1058 - DNA, 23 bp, Homo sapiens
  source 1..23: mol_type = other DNA
ttcatcctgtcatgaatgaaagg

SEQ ID NO: 1059 - DNA, 24 bp, Homo sapiens
  source 1..24: mol_type = other DNA
gacaccctgccaagcaatgaggag

SEQ ID NO: 1060 - DNA, 23 bp, Homo sapiens
  source 1..23: mol_type = other DNA
ggcctactcccaagaatgaagga

SEQ ID NO: 1061 - DNA, 23 bp, Homo sapiens
  source 1..23: mol_type = other DNA
gccacaataccaagaatgagtga

SEQ ID NO: 1062 - DNA, 22 bp, Homo sapiens
  source 1..22: mol_type = other DNA
ttcatcctgcatgaatgagagt

SEQ ID NO: 1063 - DNA, 21 bp, Homo sapiens
  source 1..21: mol_type = other DNA
gtcatccacaagaatgaatgg

SEQ ID NO: 1064 - DNA, 22 bp, Homo sapiens
  source 1..22: mol_type = other DNA
gccatcctacaaaaatgtgatg

SEQ ID NO: 1065 - DNA, 22 bp, Homo sapiens
  source 1..22: mol_type = other DNA
gccatactatcaaaatgagagg

SEQ ID NO: 1066 - DNA, 22 bp, Homo sapiens
  source 1..22: mol_type = other DNA
gccataagccaagaaatagtgg

SEQ ID NO: 1067 - DNA, 23 bp, Homo sapiens
  source 1..23: mol_type = other DNA
gccatcctaacaaaaataaagtg

SEQ ID NO: 1068 - DNA, 21 bp, Homo sapiens
  source 1..21: mol_type = other DNA
gctctactgccaagaaagtgg

SEQ ID NO: 1069 - DNA, 22 bp, Homo sapiens
  source 1..22: mol_type = other DNA
gccatcctaccaagaagagtgc

SEQ ID NO: 1070 - DNA, 21 bp, Homo sapiens
  source 1..21: mol_type = other DNA
cccatcctcaagagtgaggag

SEQ ID NO: 1071 - DNA, 22 bp, Homo sapiens
  source 1..22: mol_type = other DNA
accatcccccaaaaatgagaga

SEQ ID NO: 1072 - DNA, 23 bp, Homo sapiens
  source 1..23: mol_type = other DNA
catctccagccaaggatgagagg

SEQ ID NO: 1073 - DNA, 22 bp, Homo sapiens
  source 1..22: mol_type = other DNA
gccatctaccaagaacgggggt

SEQ ID NO: 1074 - DNA, 23 bp, Homo sapiens
  source 1..23: mol_type = other DNA
tataagaaaaccagtgtctctgg

SEQ ID NO: 1075 - DNA, 23 bp, Homo sapiens
  source 1..23: mol_type = other DNA
aataggaagaccagtgaggaggc

SEQ ID NO: 1076 - DNA, 23 bp, Homo sapiens
  source 1..23: mol_type = other DNA
tgtagggacaccagtgagtagga

SEQ ID NO: 1077 - DNA, 23 bp, Homo sapiens
  source 1..23: mol_type = other DNA
aataggaaaaccagtgaaagcgg

SEQ ID NO: 1078 - DNA, 23 bp, Homo sapiens
  source 1..23: mol_type = other DNA
agtaggaaacacagtgagacagg

SEQ ID NO: 1079 - DNA, 22 bp, Homo sapiens
  source 1..22: mol_type = other DNA
tataagaaaccagagagctggg

SEQ ID NO: 1080 - DNA, 22 bp, Homo sapiens
  source 1..22: mol_type = other DNA
tataggtatccagtgagtagag

SEQ ID NO: 1081 - DNA, 22 bp, Homo sapiens
  source 1..22: mol_type = other DNA
agtaggacaaacagtgagctgg

SEQ ID NO: 1082 - DNA, 21 bp, Homo sapiens
  source 1..21: mol_type = other DNA
tgtagaaaaaccagtatcagg

SEQ ID NO: 1083 - DNA, 22 bp, Homo sapiens
  source 1..22: mol_type = other DNA
tataggataccagtgggtccga

SEQ ID NO: 1084 - DNA, 22 bp, Homo sapiens
  source 1..22: mol_type = other DNA
agtatgagaaccagtggtccgg

SEQ ID NO: 1085 - DNA, 23 bp, Homo sapiens
  source 1..23: mol_type = other DNA
tatagaaataccagttagtggga

SEQ ID NO: 1086 - DNA, 22 bp, Homo sapiens
  source 1..22: mol_type = other DNA
gatagaaaaaccaggagccagg

SEQ ID NO: 1087 - DNA, 24 bp, Homo sapiens
  source 1..24: mol_type = other DNA
tatacggagaaccagtgagtgagt

SEQ ID NO: 1088 - DNA, 22 bp, Homo sapiens
  source 1..22: mol_type = other DNA
tatagtaaaacagtgagtgcag

SEQ ID NO: 1089 - DNA, 23 bp, Homo sapiens
  source 1..23: mol_type = other DNA
tataggtaaagcagtaagtctgg

SEQ ID NO: 1090 - DNA, 23 bp, Homo sapiens
  source 1..23: mol_type = other DNA
aatatgtaaaccagtgaacaggg

SEQ ID NO: 1091 - DNA, 22 bp, Homo sapiens
  source 1..22: mol_type = other DNA
aggaggaaaacagtgagttagg

SEQ ID NO: 1092 - DNA, 23 bp, Homo sapiens
  source 1..23: mol_type = other DNA
catagaagaaccaatgagtcaga

SEQ ID NO: 1093 - DNA, 21 bp, Homo sapiens
  source 1..21: mol_type = other DNA
aataggacccagtgagtgtgg

SEQ ID NO: 1094 - DNA, 22 bp, Homo sapiens
  source 1..22: mol_type = other DNA
atgagtaaaaccaggagtctgg

SEQ ID NO: 1095 - DNA, 22 bp, Homo sapiens
  source 1..22: mol_type = other DNA
gagaggaaaaccaataatctgg

SEQ ID NO: 1096 - DNA, 23 bp, Homo sapiens
  source 1..23: mol_type = other DNA
aatagagaaaccagggagtccag

SEQ ID NO: 1097 - DNA, 23 bp, Homo sapiens
  source 1..23: mol_type = other DNA
aataataaaaccagtgaatgggt

SEQ ID NO: 1098 - DNA, 23 bp, Homo sapiens
  source 1..23: mol_type = other DNA
tataaggataccagtgatactgg

SEQ ID NO: 1099 - DNA, 23 bp, Homo sapiens
  source 1..23: mol_type = other DNA
aataggaaaaacagtaaccaggg

SEQ ID NO: 1100 - DNA, 22 bp, Homo sapiens
  source 1..22: mol_type = other DNA
tatataaaaccagtgggtgggc

SEQ ID NO: 1101 - DNA, 23 bp, Homo sapiens
  source 1..23: mol_type = other DNA
attatgaaaaccagtaagtagag

SEQ ID NO: 1102 - DNA, 23 bp, Homo sapiens
  source 1..23: mol_type = other DNA
tataggaaaacaaatgagttggt

SEQ ID NO: 1103 - DNA, 22 bp, Homo sapiens
  source 1..22: mol_type = other DNA
tagagaaaaccagtgtgttgga

SEQ ID NO: 1104 - DNA, 23 bp, Homo sapiens
  source 1..23: mol_type = other DNA
tataggaaatacagtgactgggg

SEQ ID NO: 1105 - DNA, 23 bp, Homo sapiens
  source 1..23: mol_type = other DNA
ttaaggaaaaaccatgagtcagg

SEQ ID NO: 1106 - DNA, 23 bp, Homo sapiens
  source 1..23: mol_type = other DNA
cttagtaaaagcagtgagtaggc

SEQ ID NO: 1107 - DNA, 23 bp, Homo sapiens
  source 1..23: mol_type = other DNA
aatagataaaccagggagtgggt

SEQ ID NO: 1108 - DNA, 23 bp, Homo sapiens
  source 1..23: mol_type = other DNA
caaagaaaaaccagtgagaagga

SEQ ID NO: 1109 - DNA, 23 bp, Homo sapiens
  source 1..23: mol_type = other DNA
ctaaggagaaccagtgattccgg

SEQ ID NO: 1110 - DNA, 22 bp, Homo sapiens
  source 1..22: mol_type = other DNA
gttaggaaaacagtgattcggc

SEQ ID NO: 1111 - DNA, 23 bp, Homo sapiens
  source 1..23: mol_type = other DNA
tctaagaaaaccagtcagtctgg

SEQ ID NO: 1112 - DNA, 23 bp, Homo sapiens
  source 1..23: mol_type = other DNA
tctaggaaaaacagtgagctgag

SEQ ID NO: 1113 - DNA, 23 bp, Homo sapiens
  source 1..23: mol_type = other DNA
tataagaataccagttagattgg

SEQ ID NO: 1114 - DNA, 22 bp, Homo sapiens
  source 1..22: mol_type = other DNA
tataagaagccactgaatcagg

SEQ ID NO: 1115 - DNA, 24 bp, Homo sapiens
  source 1..24: mol_type = other DNA
cagagttaaaaccagtgagtcagc

SEQ ID NO: 1116 - DNA, 22 bp, Homo sapiens
  source 1..22: mol_type = other DNA
aataggagaaccaatattcggg

SEQ ID NO: 1117 - DNA, 22 bp, Homo sapiens
  source 1..22: mol_type = other DNA
ccaaggagaaccagtgagctgg

SEQ ID NO: 1118 - DNA, 23 bp, Homo sapiens
  source 1..23: mol_type = other DNA
aatagacaaaacagtgagtcatg

SEQ ID NO: 1119 - DNA, 23 bp, Homo sapiens
  source 1..23: mol_type = other DNA
agtaggtacaccagtgaatcagg

SEQ ID NO: 1120 - DNA, 22 bp, Homo sapiens
  source 1..22: mol_type = other DNA
cataggtataccagggatcagg

SEQ ID NO: 1121 - DNA, 23 bp, Homo sapiens
  source 1..23: mol_type = other DNA
agtatgtaaaccaatgagtgtgg

SEQ ID NO: 1122 - DNA, 22 bp, Homo sapiens
  source 1..22: mol_type = other DNA
tataggataaccaagattcagg

SEQ ID NO: 1123 - DNA, 22 bp, Homo sapiens
  source 1..22: mol_type = other DNA
agaaggaaaaccagtaggcagg

SEQ ID NO: 1124 - DNA, 22 bp, Homo sapiens
  source 1..22: mol_type = other DNA
agtaggaaaaccaggagatagg

SEQ ID NO: 1125 - DNA, 22 bp, Homo sapiens
  source 1..22: mol_type = other DNA
aatataaaaaccattggtcagg

SEQ ID NO: 1126 - DNA, 23 bp, Homo sapiens
  source 1..23: mol_type = other DNA
tatagggtaaccagggagattgg

SEQ ID NO: 1127 - DNA, 23 bp, Homo sapiens
  source 1..23: mol_type = other DNA
tgtaggaaaaccagttacaaggt

SEQ ID NO: 1128 - DNA, 22 bp, Homo sapiens
  source 1..22: mol_type = other DNA
tgtaagaacacagtgaatctgg

SEQ ID NO: 1129 - DNA, 23 bp, Homo sapiens
  source 1..23: mol_type = other DNA
ttacagcaaaccagtgagtgggg

SEQ ID NO: 1130 - DNA, 22 bp, Homo sapiens
  source 1..22: mol_type = other DNA
gacaggaaaccagtgagtctgt

SEQ ID NO: 1131 - DNA, 23 bp, Homo sapiens
  source 1..23: mol_type = other DNA
tattagaaaactaatgagtagga

SEQ ID NO: 1132 - DNA, 23 bp, Homo sapiens
  source 1..23: mol_type = other DNA
ttcagggaaaccaatgagtcatg

SEQ ID NO: 1133 - DNA, 21 bp, Homo sapiens
  source 1..21: mol_type = other DNA
gctaggaaaaccagagactgg

SEQ ID NO: 1134 - DNA, 23 bp, Homo sapiens
  source 1..23: mol_type = other DNA
tattgaaaaaccaatgagtcaaa

SEQ ID NO: 1135 - DNA, 23 bp, Homo sapiens
  source 1..23: mol_type = other DNA
ttggggaaagccaatgagtcggg

SEQ ID NO: 1136 - DNA, 23 bp, Homo sapiens
  source 1..23: mol_type = other DNA
tataggagtaccagtggtcctga

SEQ ID NO: 1137 - DNA, 22 bp, Homo sapiens
  source 1..22: mol_type = other DNA
tataagaaaatagtgagtaggc

SEQ ID NO: 1138 - DNA, 22 bp, Homo sapiens
  source 1..22: mol_type = other DNA
tatgaggaaaccaggagacagg

SEQ ID NO: 1139 - DNA, 22 bp, Homo sapiens
  source 1..22: mol_type = other DNA
cctaggagacccagtgatctgg

SEQ ID NO: 1140 - DNA, 22 bp, Homo sapiens
  source 1..22: mol_type = other DNA
tgttggaaaccagtgattcagg

SEQ ID NO: 1141 - DNA, 22 bp, Homo sapiens
  source 1..22: mol_type = other DNA
tactgtacaaccagtagtcagg

SEQ ID NO: 1142 - DNA, 22 bp, Homo sapiens
  source 1..22: mol_type = other DNA
aatagaaaaaccaggagaaggg

SEQ ID NO: 1143 - DNA, 23 bp, Homo sapiens
  source 1..23: mol_type = other DNA
tatagagaaacaagagagtccag

SEQ ID NO: 1144 - DNA, 23 bp, Homo sapiens
  source 1..23: mol_type = other DNA
tataggaaaacaagggagaccgg

SEQ ID NO: 1145 - DNA, 23 bp, Homo sapiens
  source 1..23: mol_type = other DNA
tataataaaaccagtatgtcaga

SEQ ID NO: 1146 - DNA, 23 bp, Homo sapiens
  source 1..23: mol_type = other DNA
tataaggacaccagtaatactgg

SEQ ID NO: 1147 - DNA, 23 bp, Homo sapiens
  source 1..23: mol_type = other DNA
tggggggaaaccagtgagccggg

SEQ ID NO: 1148 - DNA, 23 bp, Homo sapiens
  source 1..23: mol_type = other DNA
aaaagggaagccagtgagtcgga

SEQ ID NO: 1149 - DNA, 23 bp, Homo sapiens
  source 1..23: mol_type = other DNA
gatgggaaaaccagttagcaggt

SEQ ID NO: 1150 - DNA, 23 bp, Homo sapiens
  source 1..23: mol_type = other DNA
cagaggaagtccagtgagtgggg

SEQ ID NO: 1151 - DNA, 22 bp, Homo sapiens
  source 1..22: mol_type = other DNA
gatagaaagccagtgagtgaga

SEQ ID NO: 1152 - DNA, 23 bp, Homo sapiens
  source 1..23: mol_type = other DNA
ttgttgaaaaccagtgagacagg

SEQ ID NO: 1153 - DNA, 23 bp, Homo sapiens
  source 1..23: mol_type = other DNA
tgtaggtaaccttttgagtcagg

SEQ ID NO: 1154 - DNA, 23 bp, Homo sapiens
  source 1..23: mol_type = other DNA
ttcaagaaagccagtgatccggg

SEQ ID NO: 1155 - DNA, 23 bp, Homo sapiens
  source 1..23: mol_type = other DNA
aataggaagaccagtgactctgc

SEQ ID NO: 1156 - DNA, 22 bp, Homo sapiens
  source 1..22: mol_type = other DNA
aatagtaaagccagtggtaagg

SEQ ID NO: 1157 - DNA, 23 bp, Homo sapiens
  source 1..23: mol_type = other DNA
tactagaaaaccagagagcaggg

SEQ ID NO: 1158 - DNA, 23 bp, Homo sapiens
  source 1..23: mol_type = other DNA
aagaggaaaaaccatgagtatgg

SEQ ID NO: 1159 - DNA, 22 bp, Homo sapiens
  source 1..22: mol_type = other DNA
tacataaaaccagtgagatagg

SEQ ID NO: 1160 - DNA, 22 bp, Homo sapiens
  source 1..22: mol_type = other DNA
aatagaaaaccagtaagttgag

SEQ ID NO: 1161 - DNA, 23 bp, Homo sapiens
  source 1..23: mol_type = other DNA
gataagaaaatcagtggttctgg

SEQ ID NO: 1162 - DNA, 22 bp, Homo sapiens
  source 1..22: mol_type = other DNA
tgtagaataacagtgagtttgg

SEQ ID NO: 1163 - DNA, 23 bp, Homo sapiens
  source 1..23: mol_type = other DNA
aaatacaaaaccagtgaggctgg

SEQ ID NO: 1164 - DNA, 23 bp, Homo sapiens
  source 1..23: mol_type = other DNA
tcaaggaataccagtgatttcgg

SEQ ID NO: 1165 - DNA, 23 bp, Homo sapiens
  source 1..23: mol_type = other DNA
taaaggaaaaccagtgtgtgcag

SEQ ID NO: 1166 - DNA, 22 bp, Homo sapiens
  source 1..22: mol_type = other DNA
aatgggaaaaccaggtttcagg

SEQ ID NO: 1167 - DNA, 22 bp, Homo sapiens
  source 1..22: mol_type = other DNA
tgaagtaaaaccagtactcagg

SEQ ID NO: 1168 - DNA, 23 bp, Homo sapiens
  source 1..23: mol_type = other DNA
tataagaaaaccaggaaattggg

SEQ ID NO: 1169 - DNA, 22 bp, Homo sapiens
  source 1..22: mol_type = other DNA
cataggaaactagtgactctga

SEQ ID NO: 1170 - DNA, 23 bp, Homo sapiens
  source 1..23: mol_type = other DNA
tatagaaaattcagtgactcagg

SEQ ID NO: 1171 - DNA, 23 bp, Homo sapiens
  source 1..23: mol_type = other DNA
tatagaaaaagcagtggctctgg

SEQ ID NO: 1172 - DNA, 22 bp, Homo sapiens
  source 1..22: mol_type = other DNA
tataggaaaagcaggagagagg

SEQ ID NO: 1173 - DNA, 22 bp, Homo sapiens
  source 1..22: mol_type = other DNA
tgtagaaaaccagtgaagcagg

SEQ ID NO: 1174 - DNA, 23 bp, Homo sapiens
  source 1..23: mol_type = other DNA
aatcagaaaccctgggagtcagg

SEQ ID NO: 1175 - DNA, 23 bp, Homo sapiens
  source 1..23: mol_type = other DNA
tgtaggaaagccggtgaagtggg

SEQ ID NO: 1176 - DNA, 23 bp, Homo sapiens
  source 1..23: mol_type = other DNA
tatagagaaaccagtgcacctgg

SEQ ID NO: 1177 - DNA, 22 bp, Homo sapiens
  source 1..22: mol_type = other DNA
tataggaatccagtaagaatgg

SEQ ID NO: 1178 - DNA, 22 bp, Homo sapiens
  source 1..22: mol_type = other DNA
tatagtaaaactaatgatcaga

SEQ ID NO: 1179 - DNA, 23 bp, Homo sapiens
  source 1..23: mol_type = other DNA
aataggaagaccagttaggaggc

SEQ ID NO: 1180 - DNA, 23 bp, Homo sapiens
  source 1..23: mol_type = other DNA
tgtaggtgaaccagtggttctag

SEQ ID NO: 1181 - DNA, 22 bp, Homo sapiens
  source 1..22: mol_type = other DNA
cagtggaaaaccagagagcagg

SEQ ID NO: 1182 - DNA, 22 bp, Homo sapiens
  source 1..22: mol_type = other DNA
taaaggcaaaccaatgatcagg

SEQ ID NO: 1183 - DNA, 23 bp, Homo sapiens
  source 1..23: mol_type = other DNA
tcagtggataccagtgagtctgg

SEQ ID NO: 1184 - DNA, 22 bp, Homo sapiens
  source 1..22: mol_type = other DNA
tatctacaaccagtgagcctgg

SEQ ID NO: 1185 - DNA, 22 bp, Homo sapiens
  source 1..22: mol_type = other DNA
tagataacaccagtgagtgggg

SEQ ID NO: 1186 - DNA, 22 bp, Homo sapiens
  source 1..22: mol_type = other DNA
gagaagaaaacagtgagccagg

SEQ ID NO: 1187 - DNA, 23 bp, Homo sapiens
  source 1..23: mol_type = other DNA
aatagaaaaatcagtgagtctga

SEQ ID NO: 1188 - DNA, 23 bp, Homo sapiens
  source 1..23: mol_type = other DNA
gattctaagaccagtgagtaggg

SEQ ID NO: 1189 - DNA, 24 bp, Homo sapiens
  source 1..24: mol_type = other DNA
agtaggaaaacccaatgagtgagg

SEQ ID NO: 1190 - DNA, 23 bp, Homo sapiens
  source 1..23: mol_type = other DNA
cctctcaataccagtgagtcagg

SEQ ID NO: 1191 - DNA, 22 bp, Homo sapiens
  source 1..22: mol_type = other DNA
tatagcaaaccagagagctggg

SEQ ID NO: 1192 - DNA, 22 bp, Homo sapiens
  source 1..22: mol_type = other DNA
tctactaaaacagtgagtctgg

SEQ ID NO: 1193 - DNA, 23 bp, Homo sapiens
  source 1..23: mol_type = other DNA
atcagggaaaccagtgaatctgg

SEQ ID NO: 1194 - DNA, 22 bp, Homo sapiens
  source 1..22: mol_type = other DNA
tctatcaaaaccagtagtctag

SEQ ID NO: 1195 - DNA, 23 bp, Homo sapiens
  source 1..23: mol_type = other DNA
tataggaatgctagtgatttttg

SEQ ID NO: 1196 - DNA, 23 bp, Homo sapiens
  source 1..23: mol_type = other DNA
cacaggaaaatcagtgagttgaa

SEQ ID NO: 1197 - DNA, 23 bp, Homo sapiens
  source 1..23: mol_type = other DNA
tttatggaaaccaatgagtcaat

SEQ ID NO: 1198 - DNA, 23 bp, Homo sapiens
  source 1..23: mol_type = other DNA
gaaaagaaaaccagagaggcagg

SEQ ID NO: 1199 - DNA, 22 bp, Homo sapiens
  source 1..22: mol_type = other DNA
tgtagagaaccactgaggcagg

SEQ ID NO: 1200 - DNA, 22 bp, Homo sapiens
  source 1..22: mol_type = other DNA
tctagaaaaaccatgagccagg

SEQ ID NO: 1201 - DNA, 22 bp, Homo sapiens
  source 1..22: mol_type = other DNA
tgtgagaaaaacaggagtcagg

SEQ ID NO: 1202 - DNA, 22 bp, Homo sapiens
  source 1..22: mol_type = other DNA
taaggataaccaatggttctgg

SEQ ID NO: 1203 - DNA, 22 bp, Homo sapiens
  source 1..22: mol_type = other DNA
cagaagaaaaccaggaggcagg

SEQ ID NO: 1204 - DNA, 22 bp, Homo sapiens
  source 1..22: mol_type = other DNA
tataggagggccagtgatatgg

SEQ ID NO: 1205 - DNA, 23 bp, Homo sapiens
  source 1..23: mol_type = other DNA
tattggataaccagtggtacagg

SEQ ID NO: 1206 - DNA, 23 bp, Homo sapiens
  source 1..23: mol_type = other DNA
tttaggaaaaccagggggaatgg

SEQ ID NO: 1207 - DNA, 23 bp, Homo sapiens
  source 1..23: mol_type = other DNA
tagggggaagccagtgagccagg

SEQ ID NO: 1208 - DNA, 23 bp, Homo sapiens
  source 1..23: mol_type = other DNA
tatatctaaaccagtgatttggc

SEQ ID NO: 1209 - DNA, 23 bp, Homo sapiens
  source 1..23: mol_type = other DNA
agtagcagaatcagtgagtgggg

SEQ ID NO: 1210 - DNA, 23 bp, Homo sapiens
  source 1..23: mol_type = other DNA
tgtaggcaaaacagagattcagg

SEQ ID NO: 1211 - DNA, 23 bp, Homo sapiens
  source 1..23: mol_type = other DNA
taaaggaaacactgagagccagg

SEQ ID NO: 1212 - DNA, 23 bp, Homo sapiens
  source 1..23: mol_type = other DNA
cttcagaaaaacagtgagtctag

SEQ ID NO: 1213 - DNA, 23 bp, Homo sapiens
  source 1..23: mol_type = other DNA
gagaagaaagccggtgagtcggg

SEQ ID NO: 1214 - DNA, 23 bp, Homo sapiens
  source 1..23: mol_type = other DNA
tttcttaaaaccagtggttcagg

SEQ ID NO: 1215 - DNA, 23 bp, Homo sapiens
  source 1..23: mol_type = other DNA
gaagtgaagaccagtgagtctag

SEQ ID NO: 1216 - DNA, 23 bp, Homo sapiens
  source 1..23: mol_type = other DNA
aataggaaaaccagtcaggcgtg

SEQ ID NO: 1217 - DNA, 23 bp, Homo sapiens
  source 1..23: mol_type = other DNA
tatagcaaagccactgatttgtg

SEQ ID NO: 1218 - DNA, 22 bp, Homo sapiens
  source 1..22: mol_type = other DNA
gataagaaaaccattgatcaga

SEQ ID NO: 1219 - DNA, 22 bp, Homo sapiens
  source 1..22: mol_type = other DNA
aataggaaaacagagagaaggg

SEQ ID NO: 1220 - DNA, 22 bp, Homo sapiens
  source 1..22: mol_type = other DNA
tagaggaaaacagtgagtgctt

SEQ ID NO: 1221 - DNA, 23 bp, Homo sapiens
  source 1..23: mol_type = other DNA
tttgggaagaccagagattcatg

SEQ ID NO: 1222 - DNA, 23 bp, Homo sapiens
  source 1..23: mol_type = other DNA
agtaggaaaaacagagagttaag

SEQ ID NO: 1223 - DNA, 23 bp, Homo sapiens
  source 1..23: mol_type = other DNA
tataggtaaacttgtgacttggg

SEQ ID NO: 1224 - DNA, 23 bp, Homo sapiens
  source 1..23: mol_type = other DNA
tagaaaaaaatcagtgagtcagg

SEQ ID NO: 1225 - DNA, 23 bp, Homo sapiens
  source 1..23: mol_type = other DNA
attaggagaaacagtgagtgagg

SEQ ID NO: 1226 - DNA, 23 bp, Homo sapiens
  source 1..23: mol_type = other DNA
tatagaaacaccagttagtaaga

SEQ ID NO: 1227 - DNA, 23 bp, Homo sapiens
  source 1..23: mol_type = other DNA
cttatgaagacctgagagtcagg

SEQ ID NO: 1228 - DNA, 22 bp, Homo sapiens
  source 1..22: mol_type = other DNA
tatagggaaaccagtaatctca

SEQ ID NO: 1229 - DNA, 22 bp, Homo sapiens
  source 1..22: mol_type = other DNA
tctaggagaatcagtaagcagg

SEQ ID NO: 1230 - DNA, 22 bp, Homo sapiens
  source 1..22: mol_type = other DNA
gacaggagaaccatgagcctgg

SEQ ID NO: 1231 - DNA, 22 bp, Homo sapiens
  source 1..22: mol_type = other DNA
gataggaaaaccatgatccaga

SEQ ID NO: 1232 - DNA, 22 bp, Homo sapiens
  source 1..22: mol_type = other DNA
cataggtaaaacagggagcagg

SEQ ID NO: 1233 - DNA, 21 bp, Homo sapiens
  source 1..21: mol_type = other DNA
aatagtaaacagtgagtcaag

SEQ ID NO: 1234 - DNA, 23 bp, Homo sapiens
  source 1..23: mol_type = other DNA
cataggaataccagtgattggtc

SEQ ID NO: 1235 - DNA, 23 bp, Homo sapiens
  source 1..23: mol_type = other DNA
tctgggaagaccagtgagtgaaa

SEQ ID NO: 1236 - DNA, 23 bp, Homo sapiens
  source 1..23: mol_type = other DNA
tgtaggaaagccagtgtaggcgg

SEQ ID NO: 1237 - DNA, 23 bp, Homo sapiens
  source 1..23: mol_type = other DNA
tatataaaaatcagtgagcctgg

SEQ ID NO: 1238 - DNA, 23 bp, Homo sapiens
  source 1..23: mol_type = other DNA
agagggtaaacgagtgagtctgg

SEQ ID NO: 1239 - DNA, 23 bp, Homo sapiens
  source 1..23: mol_type = other DNA
tactggaacaccagtgaggaggc

SEQ ID NO: 1240 - DNA, 23 bp, Homo sapiens
  source 1..23: mol_type = other DNA
taaaggaaaaccagtcaggaggc

SEQ ID NO: 1241 - DNA, 23 bp, Homo sapiens
  source 1..23: mol_type = other DNA
tatatgaaaaacagtgagtatgt

SEQ ID NO: 1242 - DNA, 24 bp, Homo sapiens
  source 1..24: mol_type = other DNA
tataggaaaagcaagtgtgtatgt

SEQ ID NO: 1243 - DNA, 22 bp, Homo sapiens
  source 1..22: mol_type = other DNA
taaggaaaatcagtgaacacgg

SEQ ID NO: 1244 - DNA, 21 bp, Homo sapiens
  source 1..21: mol_type = other DNA
aataggaaacagtaaatctgg

SEQ ID NO: 1245 - DNA, 21 bp, Homo sapiens
  source 1..21: mol_type = other DNA
tataaggacaccagtgactgg

SEQ ID NO: 1246 - DNA, 21 bp, Homo sapiens
  source 1..21: mol_type = other DNA
tataggaatacctgaggctgg

SEQ ID NO: 1247 - DNA, 23 bp, Homo sapiens
  source 1..23: mol_type = other DNA
tataggtaaacttctgggccagg

SEQ ID NO: 1248 - DNA, 23 bp, Homo sapiens
  source 1..23: mol_type = other DNA
tggaaggaagccagtgagccagg

SEQ ID NO: 1249 - DNA, 23 bp, Homo sapiens
  source 1..23: mol_type = other DNA
tttaggaagatcagtggctcacg

SEQ ID NO: 1250 - DNA, 23 bp, Homo sapiens
  source 1..23: mol_type = other DNA
tgtagtaaaaacagtgaccaagg

SEQ ID NO: 1251 - DNA, 23 bp, Homo sapiens
  source 1..23: mol_type = other DNA
tagaggaaaaggattgagggagg

SEQ ID NO: 1252 - DNA, 23 bp, Homo sapiens
  source 1..23: mol_type = other DNA
tatatgaaagccatagagtcaag

SEQ ID NO: 1253 - DNA, 23 bp, Homo sapiens
  source 1..23: mol_type = other DNA
tatactattaccagtgagttttg

SEQ ID NO: 1254 - DNA, 22 bp, Homo sapiens
  source 1..22: mol_type = other DNA
catagaaaaccagtgagtttca

SEQ ID NO: 1255 - DNA, 22 bp, Homo sapiens
  source 1..22: mol_type = other DNA
tataggaaaacagagtatccag

SEQ ID NO: 1256 - DNA, 22 bp, Homo sapiens
  source 1..22: mol_type = other DNA
tataagaaaagcatcagacagg

SEQ ID NO: 1257 - DNA, 22 bp, Homo sapiens
  source 1..22: mol_type = other DNA
tagatgaaaaccagtgatgaga

SEQ ID NO: 1258 - DNA, 22 bp, Homo sapiens
  source 1..22: mol_type = other DNA
aataggaaaccattgggtgggg

SEQ ID NO: 1259 - DNA, 22 bp, Homo sapiens
  source 1..22: mol_type = other DNA
tataggtaaaccatgtgtaggt

SEQ ID NO: 1260 - DNA, 22 bp, Homo sapiens
  source 1..22: mol_type = other DNA
attaggaaaaccagtgatcaat

SEQ ID NO: 1261 - DNA, 21 bp, Homo sapiens
  source 1..21: mol_type = other DNA
tataggaatcagagcgtctgg

SEQ ID NO: 1262 - DNA, 23 bp, Homo sapiens
  source 1..23: mol_type = other DNA
tctcagaaaacaagtgagtgctg

SEQ ID NO: 1263 - DNA, 23 bp, Homo sapiens
  source 1..23: mol_type = other DNA
cataaggacaccagtgatactgg

SEQ ID NO: 1264 - DNA, 23 bp, Homo sapiens
  source 1..23: mol_type = other DNA
ggctggaaaaccagttagtccag

SEQ ID NO: 1265 - DNA, 23 bp, Homo sapiens
  source 1..23: mol_type = other DNA
aataggaagagcactgaatttgg

SEQ ID NO: 1266 - DNA, 23 bp, Homo sapiens
  source 1..23: mol_type = other DNA
tataggaatactagtgatttttg

SEQ ID NO: 1267 - DNA, 23 bp, Homo sapiens
  source 1..23: mol_type = other DNA
aaaacaaaaaacagtgagtccag

SEQ ID NO: 1268 - DNA, 23 bp, Homo sapiens
  source 1..23: mol_type = other DNA
taaaagaaaaccagagaatatag

SEQ ID NO: 1269 - DNA, 23 bp, Homo sapiens
  source 1..23: mol_type = other DNA
tatatctaaaacagtgagccagg

SEQ ID NO: 1270 - DNA, 23 bp, Homo sapiens
  source 1..23: mol_type = other DNA
tcttgcatatccagtgagtatgg

SEQ ID NO: 1271 - DNA, 23 bp, Homo sapiens
  source 1..23: mol_type = other DNA
aatacgaaaaccagtcaggtgtg

SEQ ID NO: 1272 - DNA, 23 bp, Homo sapiens
  source 1..23: mol_type = other DNA
tattatataaacattgagtcagg

SEQ ID NO: 1273 - DNA, 23 bp, Homo sapiens
  source 1..23: mol_type = other DNA
cctaggaaaaccagagaccctgt

SEQ ID NO: 1274 - DNA, 25 bp, Homo sapiens
  source 1..25: mol_type = other DNA
tataggagtgaaccacagtgtctgg

SEQ ID NO: 1275 - DNA, 22 bp, Homo sapiens
  source 1..22: mol_type = other DNA
taaaggaaacttgggagtcagg

SEQ ID NO: 1276 - DNA, 22 bp, Homo sapiens
  source 1..22: mol_type = other DNA
tacaggagaccccggagtcagg

SEQ ID NO: 1277 - DNA, 21 bp, Homo sapiens
  source 1..21: mol_type = other DNA
taaaggaatacctgagtctgg

SEQ ID NO: 1278 - DNA, 22 bp, Homo sapiens
  source 1..22: mol_type = other DNA
tataggaaaagattgaatccgg

SEQ ID NO: 1279 - DNA, 21 bp, Homo sapiens
  source 1..21: mol_type = other DNA
tatagtaaaaccagaagctgg

SEQ ID NO: 1280 - DNA, 22 bp, Homo sapiens
  source 1..22: mol_type = other DNA
tatagtgaaccagtgaggcagg

SEQ ID NO: 1281 - DNA, 23 bp, Homo sapiens
  source 1..23: mol_type = other DNA
taataggaaaccagtgactcaag

SEQ ID NO: 1282 - DNA, 22 bp, Homo sapiens
  source 1..22: mol_type = other DNA
cataagaaaaccagtattcagg

SEQ ID NO: 1283 - DNA, 23 bp, Homo sapiens
  source 1..23: mol_type = other DNA
catagtcaaatcagtgagttggt

SEQ ID NO: 1284 - DNA, 22 bp, Homo sapiens
  source 1..22: mol_type = other DNA
actaggaaaaccataagtcagg

SEQ ID NO: 1285 - DNA, 22 bp, Homo sapiens
  source 1..22: mol_type = other DNA
tatatgaaaactaatgatcagg

SEQ ID NO: 1286 - DNA, 22 bp, Homo sapiens
  source 1..22: mol_type = other DNA
tatagataaaccagtgatcaga

SEQ ID NO: 1287 - DNA, 23 bp, Homo sapiens
  source 1..23: mol_type = other DNA
tataagagaaccagtgagttaga

SEQ ID NO: 1288 - DNA, 23 bp, Homo sapiens
  source 1..23: mol_type = other DNA
aatatggaaaccagtgagtagaa

SEQ ID NO: 1289 - DNA, 23 bp, Homo sapiens
  source 1..23: mol_type = other DNA
tataggaataccactgagtcctg

SEQ ID NO: 1290 - DNA, 22 bp, Homo sapiens
  source 1..22: mol_type = other DNA
cataggaggccagtgagtcaag

SEQ ID NO: 1291 - DNA, 23 bp, Homo sapiens
  source 1..23: mol_type = other DNA
aagaggaaaaccagtaattcagg

SEQ ID NO: 1292 - DNA, 22 bp, Homo sapiens
  source 1..22: mol_type = other DNA
tatagtctaccagtgagtcagg

SEQ ID NO: 1293 - DNA, 23 bp, Homo sapiens
  source 1..23: mol_type = other DNA
tatagcaaaaccagagagtagag

SEQ ID NO: 1294 - DNA, 22 bp, Homo sapiens
  source 1..22: mol_type = other DNA
cataggagaccagtgattcaga

SEQ ID NO: 1295 - DNA, 23 bp, Homo sapiens
  source 1..23: mol_type = other DNA
tatagacaaaccagagagtttgg

SEQ ID NO: 1296 - DNA, 22 bp, Homo sapiens
  source 1..22: mol_type = other DNA
tacaggaaaccagtgactcgga

SEQ ID NO: 1297 - DNA, 22 bp, Homo sapiens
  source 1..22: mol_type = other DNA
tgtaggaagccagtgaggcctg

SEQ ID NO: 1298 - DNA, 22 bp, Homo sapiens
  source 1..22: mol_type = other DNA
tagaggaaaaccatgcatcagg

SEQ ID NO: 1299 - DNA, 22 bp, Homo sapiens
  source 1..22: mol_type = other DNA
tataggaatacccatgatctgg

SEQ ID NO: 1300 - DNA, 23 bp, Homo sapiens
  source 1..23: mol_type = other DNA
tctatagtaaccagtaagtctgg

SEQ ID NO: 1301 - DNA, 23 bp, Homo sapiens
  source 1..23: mol_type = other DNA
aataagaaagccagtgagactgg

SEQ ID NO: 1302 - DNA, 23 bp, Homo sapiens
  source 1..23: mol_type = other DNA
tataggaataacagtgagagtgg

SEQ ID NO: 1303 - DNA, 23 bp, Homo sapiens
  source 1..23: mol_type = other DNA
tatagataagccagtgaatgggc

SEQ ID NO: 1304 - DNA, 23 bp, Homo sapiens
  source 1..23: mol_type = other DNA
tagaagaaaaccagtgagtatca

SEQ ID NO: 1305 - DNA, 24 bp, Homo sapiens
  source 1..24: mol_type = other DNA
aataggaaaaccaggtgaggcggg

SEQ ID NO: 1306 - DNA, 23 bp, Homo sapiens
  source 1..23: mol_type = other DNA
aataggaaaaccagttaggaggt

SEQ ID NO: 1307 - DNA, 23 bp, Homo sapiens
  source 1..23: mol_type = other DNA
aataggaaatccagtgaaatgga

SEQ ID NO: 1308 - DNA, 23 bp, Homo sapiens
  source 1..23: mol_type = other DNA
agaaagaaaaccagtgagcccag

SEQ ID NO: 1309 - DNA, 23 bp, Homo sapiens
  source 1..23: mol_type = other DNA
tataaggacaccagtgatactgg

SEQ ID NO: 1310 - DNA, 22 bp, Homo sapiens
  source 1..22: mol_type = other DNA
tatgcaaaaccagtgagctgga

SEQ ID NO: 1311 - DNA, 23 bp, Homo sapiens
  source 1..23: mol_type = other DNA
tagctgaaaaccagtgattagga

SEQ ID NO: 1312 - DNA, 23 bp, Homo sapiens
  source 1..23: mol_type = other DNA
tacagaaaaaccagtgattcaga

SEQ ID NO: 1313 - DNA, 22 bp, Homo sapiens
  source 1..22: mol_type = other DNA
tttaaaaaaccagagagttagg

SEQ ID NO: 1314 - DNA, 23 bp, Homo sapiens
  source 1..23: mol_type = other DNA
aataggaaaaccagtaaaaaagg

SEQ ID NO: 1315 - DNA, 22 bp, Homo sapiens
  source 1..22: mol_type = other DNA
tttaggaaaaacagtattcagg

SEQ ID NO: 1316 - DNA, 24 bp, Homo sapiens
  source 1..24: mol_type = other DNA
tgtagaaaaaatcagtgagtcagg

SEQ ID NO: 1317 - DNA, 24 bp, Homo sapiens
  source 1..24: mol_type = other DNA
gataggaaaacacagtgagttcag

SEQ ID NO: 1318 - DNA, 23 bp, Homo sapiens
  source 1..23: mol_type = other DNA
tttaagaaaaccaatgagtcagt

SEQ ID NO: 1319 - DNA, 22 bp, Homo sapiens
  source 1..22: mol_type = other DNA
catagggaaacagtgagacagg

SEQ ID NO: 1320 - DNA, 22 bp, Homo sapiens
  source 1..22: mol_type = other DNA
gatagaaaaccagtgaccaggg

SEQ ID NO: 1321 - DNA, 23 bp, Homo sapiens
  source 1..23: mol_type = other DNA
tatcagaaaaccagggagtggga

SEQ ID NO: 1322 - DNA, 23 bp, Homo sapiens
  source 1..23: mol_type = other DNA
cagtggaaaatcagtgagtcaag

SEQ ID NO: 1323 - DNA, 23 bp, Homo sapiens
  source 1..23: mol_type = other DNA
tacaagaaaaccagtggtctagg

SEQ ID NO: 1324 - DNA, 23 bp, Homo sapiens
  source 1..23: mol_type = other DNA
tacaggaacaccagtgagtgtgt

SEQ ID NO: 1325 - DNA, 21 bp, Homo sapiens
  source 1..21: mol_type = other DNA
tgtaggtaatagtgagtcagg

SEQ ID NO: 1326 - DNA, 23 bp, Homo sapiens
  source 1..23: mol_type = other DNA
gtgtggaaaatcagtgagtcaga

SEQ ID NO: 1327 - DNA, 22 bp, Homo sapiens
  source 1..22: mol_type = other DNA
tatagggcaaccagtagtctga

SEQ ID NO: 1328 - DNA, 22 bp, Homo sapiens
  source 1..22: mol_type = other DNA
tataggaatacagtgagtttga

SEQ ID NO: 1329 - DNA, 22 bp, Homo sapiens
  source 1..22: mol_type = other DNA
tataggaaagcagtgaggacgg

SEQ ID NO: 1330 - DNA, 22 bp, Homo sapiens
  source 1..22: mol_type = other DNA
catagggaaactagtggtaggg

SEQ ID NO: 1331 - DNA, 22 bp, Homo sapiens
  source 1..22: mol_type = other DNA
aactggaaaaccagtggtcaag

SEQ ID NO: 1332 - DNA, 23 bp, Homo sapiens
  source 1..23: mol_type = other DNA
ttctggaaaaccagagagtttgg

SEQ ID NO: 1333 - DNA, 23 bp, Homo sapiens
  source 1..23: mol_type = other DNA
tttaggaaaaacagtgaatctag

SEQ ID NO: 1334 - DNA, 22 bp, Homo sapiens
  source 1..22: mol_type = other DNA
tgttacaaaaccagtggtcagg

SEQ ID NO: 1335 - DNA, 23 bp, Homo sapiens
  source 1..23: mol_type = other DNA
aggaggaaaacctgtgatttggg

SEQ ID NO: 1336 - DNA, 23 bp, Homo sapiens
  source 1..23: mol_type = other DNA
gggagggaaaccactgagtcagg

SEQ ID NO: 1337 - DNA, 22 bp, Homo sapiens
  source 1..22: mol_type = other DNA
gacaagaaaaccagtgaactgg

SEQ ID NO: 1338 - DNA, 23 bp, Homo sapiens
  source 1..23: mol_type = other DNA
tatgggaaagccagtgagttgag

SEQ ID NO: 1339 - DNA, 23 bp, Homo sapiens
  source 1..23: mol_type = other DNA
ccttggaaaaccagtgagtggaa

SEQ ID NO: 1340 - DNA, 23 bp, Homo sapiens
  source 1..23: mol_type = other DNA
actaaaataaccactgagtctgg

SEQ ID NO: 1341 - DNA, 22 bp, Homo sapiens
  source 1..22: mol_type = other DNA
acaaggaaaaccaggagtgtgg

SEQ ID NO: 1342 - DNA, 23 bp, Homo sapiens
  source 1..23: mol_type = other DNA
tataggtaaactagtgtcacggg

SEQ ID NO: 1343 - DNA, 23 bp, Homo sapiens
  source 1..23: mol_type = other DNA
ttttagtaaaccagtgagagagg

SEQ ID NO: 1344 - DNA, 22 bp, Homo sapiens
  source 1..22: mol_type = other DNA
tataggaaacaagtgagggctg

SEQ ID NO: 1345 - DNA, 22 bp, Homo sapiens
  source 1..22: mol_type = other DNA
aataggaaaacagggtgtctgg

SEQ ID NO: 1346 - DNA, 23 bp, Homo sapiens
  source 1..23: mol_type = other DNA
cataagaacaccagagagtaggg

SEQ ID NO: 1347 - DNA, 22 bp, Homo sapiens
  source 1..22: mol_type = other DNA
tttgagaaaaccagtggtcaga

SEQ ID NO: 1348 - DNA, 23 bp, Homo sapiens
  source 1..23: mol_type = other DNA
tgtgaggaaaccagtggttcagg

SEQ ID NO: 1349 - DNA, 23 bp, Homo sapiens
  source 1..23: mol_type = other DNA
cataagaaaaccactgagaaggg

SEQ ID NO: 1350 - DNA, 23 bp, Homo sapiens
  source 1..23: mol_type = other DNA
acaaggtaaaccagtgaggcggg

SEQ ID NO: 1351 - DNA, 22 bp, Homo sapiens
  source 1..22: mol_type = other DNA
cagaggaaaccagagggtctgg

SEQ ID NO: 1352 - DNA, 22 bp, Homo sapiens
  source 1..22: mol_type = other DNA
actaggacaaccagtagtcatg

SEQ ID NO: 1353 - DNA, 23 bp, Homo sapiens
  source 1..23: mol_type = other DNA
aataagaaaaccagtaattcagt

SEQ ID NO: 1354 - DNA, 21 bp, Homo sapiens
  source 1..21: mol_type = other DNA
cataggaaccagagagcctgg

SEQ ID NO: 1355 - DNA, 23 bp, Homo sapiens
  source 1..23: mol_type = other DNA
ggtaagtaaaccagtgaattagg

SEQ ID NO: 1356 - DNA, 23 bp, Homo sapiens
  source 1..23: mol_type = other DNA
tgtaagaaaaccagtaagctagt

SEQ ID NO: 1357 - DNA, 23 bp, Homo sapiens
  source 1..23: mol_type = other DNA
tgtaagaaaaccagcgagctagc

SEQ ID NO: 1358 - DNA, 23 bp, Homo sapiens
  source 1..23: mol_type = other DNA
tagaggaaaaccagtcagtggat

SEQ ID NO: 1359 - DNA, 22 bp, Homo sapiens
  source 1..22: mol_type = other DNA
aataggaaaactgttgatctgg

SEQ ID NO: 1360 - DNA, 22 bp, Homo sapiens
  source 1..22: mol_type = other DNA
aataggaaaactgtgaataagg

SEQ ID NO: 1361 - DNA, 22 bp, Homo sapiens
  source 1..22: mol_type = other DNA
tataaaataaccagtgaacagg

SEQ ID NO: 1362 - DNA, 22 bp, Homo sapiens
  source 1..22: mol_type = other DNA
tctggaagaccagtgagctggg

SEQ ID NO: 1363 - DNA, 23 bp, Homo sapiens
  source 1..23: mol_type = other DNA
tattagagagccagtgagtggga

SEQ ID NO: 1364 - DNA, 22 bp, Homo sapiens
  source 1..22: mol_type = other DNA
agtttgaaaaccagtggtctgg

SEQ ID NO: 1365 - DNA, 23 bp, Homo sapiens
  source 1..23: mol_type = other DNA
tacagggaaaccagtgagggggt

SEQ ID NO: 1366 - DNA, 22 bp, Homo sapiens
  source 1..22: mol_type = other DNA
tatttgaaaaccatgagtccag

SEQ ID NO: 1367 - DNA, 23 bp, Homo sapiens
  source 1..23: mol_type = other DNA
aatcggaaaaccaggtgatcggg

SEQ ID NO: 1368 - DNA, 24 bp, Homo sapiens
  source 1..24: mol_type = other DNA
ggtaggaaagaccagtgaggtagg

SEQ ID NO: 1369 - DNA, 22 bp, Homo sapiens
  source 1..22: mol_type = other DNA
taaggaaaaccagtaaatgcag

SEQ ID NO: 1370 - DNA, 22 bp, Homo sapiens
  source 1..22: mol_type = other DNA
tgtaggaaccccatgagtaagg

SEQ ID NO: 1371 - DNA, 23 bp, Homo sapiens
  source 1..23: mol_type = other DNA
tatatgaaaaacagtgagtacta

SEQ ID NO: 1372 - DNA, 23 bp, Homo sapiens
  source 1..23: mol_type = other DNA
agtaggaaaaccaagtagtccag

SEQ ID NO: 1373 - DNA, 23 bp, Homo sapiens
  source 1..23: mol_type = other DNA
cacaggaaaaccagtgagaagag

SEQ ID NO: 1374 - DNA, 23 bp, Homo sapiens
  source 1..23: mol_type = other DNA
tagattttaaccagtgagtccgt

SEQ ID NO: 1375 - DNA, 24 bp, Homo sapiens
  source 1..24: mol_type = other DNA
tatagcagaaacagtggagtctgg

SEQ ID NO: 1376 - DNA, 21 bp, Homo sapiens
  source 1..21: mol_type = other DNA
tataggtaaactagtgtcatg

SEQ ID NO: 1377 - DNA, 22 bp, Homo sapiens
  source 1..22: mol_type = other DNA
tataggattcccaggaatctgg

SEQ ID NO: 1378 - DNA, 23 bp, Homo sapiens
  source 1..23: mol_type = other DNA
gacattaaaaccagtgagtgagc

SEQ ID NO: 1379 - DNA, 22 bp, Homo sapiens
  source 1..22: mol_type = other DNA
gaaaggaaaacagtgagtgggc

SEQ ID NO: 1380 - DNA, 22 bp, Homo sapiens
  source 1..22: mol_type = other DNA
gaaagggaaaccagtgatcaga

SEQ ID NO: 1381 - DNA, 23 bp, Homo sapiens
  source 1..23: mol_type = other DNA
ttccagaaaaccagggagtctgg

SEQ ID NO: 1382 - DNA, 23 bp, Homo sapiens
  source 1..23: mol_type = other DNA
ggaaggaaaaacagtgagttcag

SEQ ID NO: 1383 - DNA, 22 bp, Homo sapiens
  source 1..22: mol_type = other DNA
caaaagaaaacagtgagtcaga

SEQ ID NO: 1384 - DNA, 23 bp, Homo sapiens
  source 1..23: mol_type = other DNA
tgggggaaagccagtgagccagg

SEQ ID NO: 1385 - DNA, 24 bp, Homo sapiens
  source 1..24: mol_type = other DNA
tatagggaagaccagtgattcaga

SEQ ID NO: 1386 - DNA, 21 bp, Homo sapiens
  source 1..21: mol_type = other DNA
gatatgaaaaccagagtctgg

SEQ ID NO: 1387 - DNA, 23 bp, Homo sapiens
  source 1..23: mol_type = other DNA
ttgaggaaaaccagtgagatgat

SEQ ID NO: 1388 - DNA, 23 bp, Homo sapiens
  source 1..23: mol_type = other DNA
tgtaagaaaaccatgtagtctag

SEQ ID NO: 1389 - DNA, 21 bp, Homo sapiens
  source 1..21: mol_type = other DNA
tgtagcaaccagtgattctgg

SEQ ID NO: 1390 - DNA, 21 bp, Homo sapiens
  source 1..21: mol_type = other DNA
gatagcaaaacctgagtctgg

SEQ ID NO: 1391 - DNA, 23 bp, Homo sapiens
  source 1..23: mol_type = other DNA
tattaggaaacctgtgggtcagg

SEQ ID NO: 1392 - DNA, 23 bp, Homo sapiens
  source 1..23: mol_type = other DNA
taaaggaaatccagtgacttctg

SEQ ID NO: 1393 - DNA, 23 bp, Homo sapiens
  source 1..23: mol_type = other DNA
gaaggaaaaaccagtgggtaggg

SEQ ID NO: 1394 - DNA, 23 bp, Homo sapiens
  source 1..23: mol_type = other DNA
attagtaaaaccagtgagttaaa

SEQ ID NO: 1395 - DNA, 22 bp, Homo sapiens
  source 1..22: mol_type = other DNA
tttaggaaaaccagaattatgg

SEQ ID NO: 1396 - DNA, 23 bp, Homo sapiens
  source 1..23: mol_type = other DNA
tgtaggaagtctagtgagtgagc

SEQ ID NO: 1397 - DNA, 23 bp, Homo sapiens
  source 1..23: mol_type = other DNA
ggtaggaaagacggtgagtgcgg

SEQ ID NO: 1398 - DNA, 23 bp, Homo sapiens
  source 1..23: mol_type = other DNA
tatataaaaatccatgagtcggg

SEQ ID NO: 1399 - DNA, 24 bp, Homo sapiens
  source 1..24: mol_type = other DNA
tatatgtaaaacaagtgagtgagg

SEQ ID NO: 1400 - DNA, 22 bp, Homo sapiens
  source 1..22: mol_type = other DNA
aataggaaaaccttgggtcagg

SEQ ID NO: 1401 - DNA, 23 bp, Homo sapiens
  source 1..23: mol_type = other DNA
tataggtaaacctgtgacatggg

SEQ ID NO: 1402 - DNA, 22 bp, Homo sapiens
  source 1..22: mol_type = other DNA
tatatgtaaacagtgattccgg

SEQ ID NO: 1403 - DNA, 23 bp, Homo sapiens
  source 1..23: mol_type = other DNA
tatatgaaaaccagtgatagaat

SEQ ID NO: 1404 - DNA, 22 bp, Homo sapiens
  source 1..22: mol_type = other DNA
tcaatcaaaaccagtgatctgg

SEQ ID NO: 1405 - DNA, 23 bp, Homo sapiens
  source 1..23: mol_type = other DNA
ttttggaaaaccagggagtgggg

SEQ ID NO: 1406 - DNA, 23 bp, Homo sapiens
  source 1..23: mol_type = other DNA
attaggaaactcagtgagacagg

SEQ ID NO: 1407 - DNA, 23 bp, Homo sapiens
  source 1..23: mol_type = other DNA
gaggggaagaccagtgagtccag

SEQ ID NO: 1408 - DNA, 23 bp, Homo sapiens
  source 1..23: mol_type = other DNA
aaaagaaaaaccagagagtggga

SEQ ID NO: 1409 - DNA, 23 bp, Homo sapiens
  source 1..23: mol_type = other DNA
ttgttgaaaaccagtgattgggg

SEQ ID NO: 1410 - DNA, 24 bp, Homo sapiens
  source 1..24: mol_type = other DNA
tgtaacaagaaccagtgagttggg

SEQ ID NO: 1411 - DNA, 23 bp, Homo sapiens
  source 1..23: mol_type = other DNA
aatatgaaaaccagtcagtcgtg

SEQ ID NO: 1412 - DNA, 23 bp, Homo sapiens
  source 1..23: mol_type = other DNA
aatgggaaaaccagagagttgag

SEQ ID NO: 1413 - DNA, 23 bp, Homo sapiens
  source 1..23: mol_type = other DNA
taaaaggaaaccagtgagtggat

SEQ ID NO: 1414 - DNA, 23 bp, Homo sapiens
  source 1..23: mol_type = other DNA
tatagcaaaagcagtaatcaggg

SEQ ID NO: 1415 - DNA, 22 bp, Homo sapiens
  source 1..22: mol_type = other DNA
tattgaaataccatgagtcagg

SEQ ID NO: 1416 - DNA, 23 bp, Homo sapiens
  source 1..23: mol_type = other DNA
ggtaggaaaatcagtaagtgagg

SEQ ID NO: 1417 - DNA, 23 bp, Homo sapiens
  source 1..23: mol_type = other DNA
gaaaagaaaagcagtgagtctgg

SEQ ID NO: 1418 - DNA, 23 bp, Homo sapiens
  source 1..23: mol_type = other DNA
cagaggtagaccactgagtcttg

SEQ ID NO: 1419 - DNA, 23 bp, Homo sapiens
  source 1..23: mol_type = other DNA
cacaggaaaaccaatgagaaagg

SEQ ID NO: 1420 - DNA, 22 bp, Homo sapiens
  source 1..22: mol_type = other DNA
tatgtgaaaaccattgatcagg

SEQ ID NO: 1421 - DNA, 23 bp, Homo sapiens
  source 1..23: mol_type = other DNA
catcctaaaaccagagattcagg

SEQ ID NO: 1422 - DNA, 23 bp, Homo sapiens
  source 1..23: mol_type = other DNA
tgtaggaaacccagtgaccagag

SEQ ID NO: 1423 - DNA, 23 bp, Homo sapiens
  source 1..23: mol_type = other DNA
ttagagtaaacaagtgagtcagg

SEQ ID NO: 1424 - DNA, 24 bp, Homo sapiens
  source 1..24: mol_type = other DNA
tataggcactgcagtgaggtctgg

SEQ ID NO: 1425 - DNA, 22 bp, Homo sapiens
  source 1..22: mol_type = other DNA
aatagaaagccagagattcagg

SEQ ID NO: 1426 - DNA, 22 bp, Homo sapiens
  source 1..22: mol_type = other DNA
tctagcaaaccagtgagtctgc

SEQ ID NO: 1427 - DNA, 23 bp, Homo sapiens
  source 1..23: mol_type = other DNA
tatacagaacccagagagtctgg

SEQ ID NO: 1428 - DNA, 23 bp, Homo sapiens
  source 1..23: mol_type = other DNA
ttcagggataccagtgagtcaaa

SEQ ID NO: 1429 - DNA, 23 bp, Homo sapiens
  source 1..23: mol_type = other DNA
gaagggaaaaccaatgagtacag

SEQ ID NO: 1430 - DNA, 23 bp, Homo sapiens
  source 1..23: mol_type = other DNA
caaagcaaaaccagtgagtctaa

SEQ ID NO: 1431 - DNA, 24 bp, Homo sapiens
  source 1..24: mol_type = other DNA
aggagggaaaccagatgagtcagg

SEQ ID NO: 1432 - DNA, 21 bp, Homo sapiens
  source 1..21: mol_type = other DNA
tgtctgaaaaccagagtctgg

SEQ ID NO: 1433 - DNA, 23 bp, Homo sapiens
  source 1..23: mol_type = other DNA
tgtttgaaaaccagtaagctagg

SEQ ID NO: 1434 - DNA, 23 bp, Homo sapiens
  source 1..23: mol_type = other DNA
aagaagaaaaccagtaagtggtg

SEQ ID NO: 1435 - DNA, 23 bp, Homo sapiens
  source 1..23: mol_type = other DNA
agtaagaaaaccatggagtgtgg

SEQ ID NO: 1436 - DNA, 23 bp, Homo sapiens
  source 1..23: mol_type = other DNA
agaaagaaaacctgtgagtaagg

SEQ ID NO: 1437 - DNA, 23 bp, Homo sapiens
  source 1..23: mol_type = other DNA
tataggtaaactcgtgactcagg

SEQ ID NO: 1438 - DNA, 22 bp, Homo sapiens
  source 1..22: mol_type = other DNA
tataagaagaacatgagtcagg

SEQ ID NO: 1439 - DNA, 22 bp, Homo sapiens
  source 1..22: mol_type = other DNA
gataggtacaccatgagcctgg

SEQ ID NO: 1440 - DNA, 22 bp, Homo sapiens
  source 1..22: mol_type = other DNA
tagaggagaaccaggagtgtgt

SEQ ID NO: 1441 - DNA, 23 bp, Homo sapiens
  source 1..23: mol_type = other DNA
aaatcaaaaatcagtgagtctgg

SEQ ID NO: 1442 - DNA, 23 bp, Homo sapiens
  source 1..23: mol_type = other DNA
tattggaaaggctgtgtgtatgg

SEQ ID NO: 1443 - DNA, 23 bp, Homo sapiens
  source 1..23: mol_type = other DNA
ttgtggaaaaccactgaatttgg

SEQ ID NO: 1444 - DNA, 23 bp, Homo sapiens
  source 1..23: mol_type = other DNA
tatattttaaccagtgagctagg

SEQ ID NO: 1445 - DNA, 23 bp, Homo sapiens
  source 1..23: mol_type = other DNA
taaaggtgaacctgtgattctgg

SEQ ID NO: 1446 - DNA, 23 bp, Homo sapiens
  source 1..23: mol_type = other DNA
gatagggacaccagtgagttgct

SEQ ID NO: 1447 - DNA, 24 bp, Homo sapiens
  source 1..24: mol_type = other DNA
aataggatacactagagagtctgg

SEQ ID NO: 1448 - DNA, 21 bp, Homo sapiens
  source 1..21: mol_type = other DNA
gaatggaaaacctgagtctgg

SEQ ID NO: 1449 - DNA, 23 bp, Homo sapiens
  source 1..23: mol_type = other DNA
agtaggagaaagagtgagttggg

SEQ ID NO: 1450 - DNA, 23 bp, Homo sapiens
  source 1..23: mol_type = other DNA
aaaaggaaaacgagtgagaagga

SEQ ID NO: 1451 - DNA, 23 bp, Homo sapiens
  source 1..23: mol_type = other DNA
ttctgggaaaccagtgagtcaca

SEQ ID NO: 1452 - DNA, 23 bp, Homo sapiens
  source 1..23: mol_type = other DNA
tctaagaaaaccaatcagtgtgc

SEQ ID NO: 1453 - DNA, 23 bp, Homo sapiens
  source 1..23: mol_type = other DNA
tataaggacaccagtgatatggg

SEQ ID NO: 1454 - DNA, 23 bp, Homo sapiens
  source 1..23: mol_type = other DNA
tataggaaaacaaatgactttgg

SEQ ID NO: 1455 - DNA, 23 bp, Homo sapiens
  source 1..23: mol_type = other DNA
ttaggggaagccagtgagccagg

SEQ ID NO: 1456 - DNA, 23 bp, Homo sapiens
  source 1..23: mol_type = other DNA
aataagagaaccagtgagtgttt

SEQ ID NO: 1457 - DNA, 23 bp, Homo sapiens
  source 1..23: mol_type = other DNA
tatagtaaaaccaatgagaaagt

SEQ ID NO: 1458 - DNA, 22 bp, Homo sapiens
  source 1..22: mol_type = other DNA
tatagaagaggaatgagtctgg

SEQ ID NO: 1459 - DNA, 22 bp, Homo sapiens
  source 1..22: mol_type = other DNA
catggaataccaatgagtgagg

SEQ ID NO: 1460 - DNA, 22 bp, Homo sapiens
  source 1..22: mol_type = other DNA
tataggaaatcaatgaggcaga

SEQ ID NO: 1461 - DNA, 22 bp, Homo sapiens
  source 1..22: mol_type = other DNA
tttaggaaaagagtgagtgagg

SEQ ID NO: 1462 - DNA, 23 bp, Homo sapiens
  source 1..23: mol_type = other DNA
aaaacgaaaaccagtgaggcgtg

SEQ ID NO: 1463 - DNA, 23 bp, Homo sapiens
  source 1..23: mol_type = other DNA
cagatggaaagcagtgattcggg

SEQ ID NO: 1464 - DNA, 23 bp, Homo sapiens
  source 1..23: mol_type = other DNA
aataggaagatcagagagcctag

SEQ ID NO: 1465 - DNA, 23 bp, Homo sapiens
  source 1..23: mol_type = other DNA
gtgagaaaaaacaatgagtctgg

SEQ ID NO: 1466 - DNA, 23 bp, Homo sapiens
  source 1..23: mol_type = other DNA
aataggaaaacccctgagttaca

SEQ ID NO: 1467 - DNA, 23 bp, Homo sapiens
  source 1..23: mol_type = other DNA
aagatctataccagtgagtctgg

SEQ ID NO: 1468 - DNA, 23 bp, Homo sapiens
  source 1..23: mol_type = other DNA
cctaggaaaacctgaggctctgg

SEQ ID NO: 1469 - DNA, 23 bp, Homo sapiens
  source 1..23: mol_type = other DNA
gataggattaccattgaatctgt

SEQ ID NO: 1470 - DNA, 23 bp, Homo sapiens
  source 1..23: mol_type = other DNA
tataggtaaataagtgagtttca

SEQ ID NO: 1471 - DNA, 23 bp, Homo sapiens
  source 1..23: mol_type = other DNA
tatagaataaccagtgagaaaag

SEQ ID NO: 1472 - DNA, 22 bp, Homo sapiens
  source 1..22: mol_type = other DNA
tatacggaaacagtaagtatgg

SEQ ID NO: 1473 - DNA, 22 bp, Homo sapiens
  source 1..22: mol_type = other DNA
catgggaaaaccatgtgtctga

SEQ ID NO: 1474 - DNA, 21 bp, Homo sapiens
  source 1..21: mol_type = other DNA
taaagaaaaacctgagactgg

SEQ ID NO: 1475 - DNA, 22 bp, Homo sapiens
  source 1..22: mol_type = other DNA
tataggaaaacagtgatgaaga

SEQ ID NO: 1476 - DNA, 22 bp, Homo sapiens
  source 1..22: mol_type = other DNA
cataggaaaactagtagtatgc

SEQ ID NO: 1477 - DNA, 23 bp, Homo sapiens
  source 1..23: mol_type = other DNA
tagaagaaaagtagtgaggcatg

SEQ ID NO: 1478 - DNA, 23 bp, Homo sapiens
  source 1..23: mol_type = other DNA
tgtaggtaaactagtgtcacggg

SEQ ID NO: 1479 - DNA, 23 bp, Homo sapiens
  source 1..23: mol_type = other DNA
attaggaaaaccagtttatcaga

SEQ ID NO: 1480 - DNA, 23 bp, Homo sapiens
  source 1..23: mol_type = other DNA
tgtagaaaagccactgaattggg

SEQ ID NO: 1481 - DNA, 23 bp, Homo sapiens
  source 1..23: mol_type = other DNA
tagaggaaaaccagaaacactgg

SEQ ID NO: 1482 - DNA, 23 bp, Homo sapiens
  source 1..23: mol_type = other DNA
tgtttgtaaaccagtgagacaag

SEQ ID NO: 1483 - DNA, 23 bp, Homo sapiens
  source 1..23: mol_type = other DNA
tctaggataacaagtgagttaca

SEQ ID NO: 1484 - DNA, 23 bp, Homo sapiens
  source 1..23: mol_type = other DNA
tataagaaaacaagtaattctga

SEQ ID NO: 1485 - DNA, 23 bp, Homo sapiens
  source 1..23: mol_type = other DNA
cagaggacaaccagttagtggga

SEQ ID NO: 1486 - DNA, 23 bp, Homo sapiens
  source 1..23: mol_type = other DNA
taaaggaaaaccaatgactgatg

SEQ ID NO: 1487 - DNA, 23 bp, Homo sapiens
  source 1..23: mol_type = other DNA
gaatggaaaagcactgagtcaga

SEQ ID NO: 1488 - DNA, 23 bp, Homo sapiens
  source 1..23: mol_type = other DNA
aatagaaaaaccagggaattggg

SEQ ID NO: 1489 - DNA, 23 bp, Homo sapiens
  source 1..23: mol_type = other DNA
tataggaaaccccataagacaag

SEQ ID NO: 1490 - DNA, 23 bp, Homo sapiens
  source 1..23: mol_type = other DNA
aataggaaaaccagtgcggtaat

SEQ ID NO: 1491 - DNA, 23 bp, Homo sapiens
  source 1..23: mol_type = other DNA
taaagagacaccagtgattccgt

SEQ ID NO: 1492 - DNA, 23 bp, Homo sapiens
  source 1..23: mol_type = other DNA
tagaggaaaagcaatgaaattgg

SEQ ID NO: 1493 - DNA, 23 bp, Homo sapiens
  source 1..23: mol_type = other DNA
tataggaaaaccagagaaaaata

SEQ ID NO: 1494 - DNA, 23 bp, Homo sapiens
  source 1..23: mol_type = other DNA
aggatgaaacccagtaagtctgg

SEQ ID NO: 1495 - DNA, 23 bp, Homo sapiens
  source 1..23: mol_type = other DNA
tatagagaaacaagtgattaaga

SEQ ID NO: 1496 - DNA, 23 bp, Homo sapiens
  source 1..23: mol_type = other DNA
tatagaaacaccagtgattttat

SEQ ID NO: 1497 - DNA, 23 bp, Homo sapiens
  source 1..23: mol_type = other DNA
gataggaatagcattgaatctgt

SEQ ID NO: 1498 - DNA, 24 bp, Homo sapiens
  source 1..24: mol_type = other DNA
tatagaaaatactagtgggtaagg

SEQ ID NO: 1499 - DNA, 22 bp, Homo sapiens
  source 1..22: mol_type = other DNA
tagaggaaaacctgtagtaaga

SEQ ID NO: 1500 - DNA, 22 bp, Homo sapiens
  source 1..22: mol_type = other DNA
tatagatagccagtaagtcaag

SEQ ID NO: 1501 - DNA, 22 bp, Homo sapiens
  source 1..22: mol_type = other DNA
tataggtaaaccatgactacag

SEQ ID NO: 1502 - DNA, 22 bp, Homo sapiens
  source 1..22: mol_type = other DNA
tacaggaaaagtaggattcggg

SEQ ID NO: 1503 - DNA, 21 bp, Homo sapiens
  source 1..21: mol_type = other DNA
tataggaaaataaaagtctgg

SEQ ID NO: 1504 - DNA, 23 bp, Homo sapiens
  source 1..23: mol_type = other DNA
tataggaagtccatggagtagag

SEQ ID NO: 1505 - DNA, 23 bp, Homo sapiens
  source 1..23: mol_type = other DNA
tgggggaaaaccagttaggaagg

SEQ ID NO: 1506 - DNA, 23 bp, Homo sapiens
  source 1..23: mol_type = other DNA
taaaggaaattctgtgaaactgg

SEQ ID NO: 1507 - DNA, 23 bp, Homo sapiens
  source 1..23: mol_type = other DNA
cagagaaaaaccagtgagtttca

SEQ ID NO: 1508 - DNA, 23 bp, Homo sapiens
  source 1..23: mol_type = other DNA
tatagtaaaacaagtgaaataga

SEQ ID NO: 1509 - DNA, 23 bp, Homo sapiens
  source 1..23: mol_type = other DNA
taaaagaaaaccagttattccag

SEQ ID NO: 1510 - DNA, 23 bp, Homo sapiens
  source 1..23: mol_type = other DNA
tcgaggaaaatcagtgtctctgg

SEQ ID NO: 1511 - DNA, 23 bp, Homo sapiens
  source 1..23: mol_type = other DNA
aatacaaaaaccagtcaggcgcg

SEQ ID NO: 1512 - DNA, 23 bp, Homo sapiens
  source 1..23: mol_type = other DNA
tttaggaatacctaagagtcctg

SEQ ID NO: 1513 - DNA, 23 bp, Homo sapiens
  source 1..23: mol_type = other DNA
tacatgaaattcactgaatctgg

SEQ ID NO: 1514 - DNA, 23 bp, Homo sapiens
  source 1..23: mol_type = other DNA
tataagaaaaccagtcatattgg

SEQ ID NO: 1515 - DNA, 23 bp, Homo sapiens
  source 1..23: mol_type = other DNA
agtgggaaaacctgttagtttgg

SEQ ID NO: 1516 - DNA, 25 bp, Homo sapiens
  source 1..25: mol_type = other DNA
catagtaaaaccaatgacagtttgg

SEQ ID NO: 1517 - DNA, 24 bp, Homo sapiens
  source 1..24: mol_type = other DNA
aatagaaagactcagtgagtctag

SEQ ID NO: 1518 - DNA, 22 bp, Homo sapiens
  source 1..22: mol_type = other DNA
taaagaaaaccagcaagtaagg

SEQ ID NO: 1519 - DNA, 22 bp, Homo sapiens
  source 1..22: mol_type = other DNA
catgggaaaagctggagtcagg

SEQ ID NO: 1520 - DNA, 22 bp, Homo sapiens
  source 1..22: mol_type = other DNA
tgaaagaaaaccaggagtcaga

SEQ ID NO: 1521 - DNA, 22 bp, Homo sapiens
  source 1..22: mol_type = other DNA
tataaaaaatctagtggtcagg

SEQ ID NO: 1522 - DNA, 21 bp, Homo sapiens
  source 1..21: mol_type = other DNA
tataggaacacctgtgtctga

SEQ ID NO: 1523 - DNA, 22 bp, Homo sapiens
  source 1..22: mol_type = other DNA
cataagaaaaccatgagtcatg

SEQ ID NO: 1524 - DNA, 22 bp, Homo sapiens
  source 1..22: mol_type = other DNA
taaaggaaaaacaatgatgtgg

SEQ ID NO: 1525 - DNA, 23 bp, Homo sapiens
  source 1..23: mol_type = other DNA
tgtagaaaaaccagtgaataaga

SEQ ID NO: 1526 - DNA, 23 bp, Homo sapiens
  source 1..23: mol_type = other DNA
caaaggaaaaccagtgagtgtgg

SEQ ID NO: 1527 - DNA, 23 bp, Homo sapiens
  source 1..23: mol_type = other DNA
agcaggaaaaccagtgagcagag

SEQ ID NO: 1528 - DNA, 24 bp, Homo sapiens
  source 1..24: mol_type = other DNA
tcaagtagaaaccaatgagtcagg

SEQ ID NO: 1529 - DNA, 23 bp, Homo sapiens
  source 1..23: mol_type = other DNA
tgtaagaataccagtgaggctgg

SEQ ID NO: 1530 - DNA, 23 bp, Homo sapiens
  source 1..23: mol_type = other DNA
tgtagagagaccagtgagtaggg

SEQ ID NO: 1531 - DNA, 23 bp, Homo sapiens
  source 1..23: mol_type = other DNA
aatagcaaaaccaataagtagga

SEQ ID NO: 1532 - DNA, 22 bp, Homo sapiens
  source 1..22: mol_type = other DNA
tgtagataaaccagtgatatgg

SEQ ID NO: 1533 - DNA, 23 bp, Homo sapiens
  source 1..23: mol_type = other DNA
tgtagctaaatcagtgagtagga

SEQ ID NO: 1534 - DNA, 24 bp, Homo sapiens
  source 1..24: mol_type = other DNA
tatagaaaaaatcagtgagtcagg

SEQ ID NO: 1535 - DNA, 22 bp, Homo sapiens
  source 1..22: mol_type = other DNA
tatagaaaaccagaaagcctgg

SEQ ID NO: 1536 - DNA, 22 bp, Homo sapiens
  source 1..22: mol_type = other DNA
cctaggaaaactagtgaacggg

SEQ ID NO: 1537 - DNA, 23 bp, Homo sapiens
  source 1..23: mol_type = other DNA
ttgaggaaaactagtgagtgagc

SEQ ID NO: 1538 - DNA, 23 bp, Homo sapiens
  source 1..23: mol_type = other DNA
gtggggaaaaccagtgagccagg

SEQ ID NO: 1539 - DNA, 22 bp, Homo sapiens
  source 1..22: mol_type = other DNA
tataggtcaccattgagtcaag

SEQ ID NO: 1540 - DNA, 23 bp, Homo sapiens
  source 1..23: mol_type = other DNA
ggtaggaaaaccagttatccagg

SEQ ID NO: 1541 - DNA, 21 bp, Homo sapiens
  source 1..21: mol_type = other DNA
tataggaaaccaaaagtcagg

SEQ ID NO: 1542 - DNA, 23 bp, Homo sapiens
  source 1..23: mol_type = other DNA
tatgaggaaaccagtgagtagaa

SEQ ID NO: 1543 - DNA, 22 bp, Homo sapiens
  source 1..22: mol_type = other DNA
tataggaaaactataaatcagg

SEQ ID NO: 1544 - DNA, 22 bp, Homo sapiens
  source 1..22: mol_type = other DNA
catatgaaaccagtgagtaaga

SEQ ID NO: 1545 - DNA, 23 bp, Homo sapiens
  source 1..23: mol_type = other DNA
tataggaaaaacagtgtatacag

SEQ ID NO: 1546 - DNA, 23 bp, Homo sapiens
  source 1..23: mol_type = other DNA
tagaggaaaaccagagagaaggt

SEQ ID NO: 1547 - DNA, 23 bp, Homo sapiens
  source 1..23: mol_type = other DNA
gacataaaaaccagtgagtgtgg

SEQ ID NO: 1548 - DNA, 23 bp, Homo sapiens
  source 1..23: mol_type = other DNA
attgggaaaaccagtgactctga

SEQ ID NO: 1549 - DNA, 23 bp, Homo sapiens
  source 1..23: mol_type = other DNA
tataaagagaccagtgagtgtgg

SEQ ID NO: 1550 - DNA, 23 bp, Homo sapiens
  source 1..23: mol_type = other DNA
tataggtaaactaatgactcggg

SEQ ID NO: 1551 - DNA, 22 bp, Homo sapiens
  source 1..22: mol_type = other DNA
cataggaaaaccaataggctgg

SEQ ID NO: 1552 - DNA, 23 bp, Homo sapiens
  source 1..23: mol_type = other DNA
gataggaaaaacagagagctgga

SEQ ID NO: 1553 - DNA, 22 bp, Homo sapiens
  source 1..22: mol_type = other DNA
tatagaaaaactagtggccagg

SEQ ID NO: 1554 - DNA, 23 bp, Homo sapiens
  source 1..23: mol_type = other DNA
cctaggaaagccagtgaggtgga

SEQ ID NO: 1555 - DNA, 23 bp, Homo sapiens
  source 1..23: mol_type = other DNA
taaagaaaaaccaatgaatctgg

SEQ ID NO: 1556 - DNA, 22 bp, Homo sapiens
  source 1..22: mol_type = other DNA
tataggataaccaagagtcctg

SEQ ID NO: 1557 - DNA, 22 bp, Homo sapiens
  source 1..22: mol_type = other DNA
cataagaaaaccaagactcagg

SEQ ID NO: 1558 - DNA, 23 bp, Homo sapiens
  source 1..23: mol_type = other DNA
aatatgtaaaccagtgggtctgg

SEQ ID NO: 1559 - DNA, 22 bp, Homo sapiens
  source 1..22: mol_type = other DNA
tgtatgaacccagtgggtctgg

SEQ ID NO: 1560 - DNA, 22 bp, Homo sapiens
  source 1..22: mol_type = other DNA
ttaagtaaaaccataagtcagg

SEQ ID NO: 1561 - DNA, 23 bp, Homo sapiens
  source 1..23: mol_type = other DNA
tataggaaaaccagtgaccagtg

SEQ ID NO: 1562 - DNA, 22 bp, Homo sapiens
  source 1..22: mol_type = other DNA
ttactgaaaaccagtagtcggg

SEQ ID NO: 1563 - DNA, 25 bp, Homo sapiens
  source 1..25: mol_type = other DNA
tgtagtaaggaaccagtaagtaggg

SEQ ID NO: 1564 - DNA, 23 bp, Homo sapiens
  source 1..23: mol_type = other DNA
tgtagctaaaacagtgagttgga

SEQ ID NO: 1565 - DNA, 22 bp, Homo sapiens
  source 1..22: mol_type = other DNA
ttactgaaaaccagtagtcagg

SEQ ID NO: 1566 - DNA, 21 bp, Homo sapiens
  source 1..21: mol_type = other DNA
taaaggaaaacctgagtctgg

SEQ ID NO: 1567 - DNA, 24 bp, Homo sapiens
  source 1..24: mol_type = other DNA
tatattaaaaaccagtgagtcata

SEQ ID NO: 1568 - DNA, 23 bp, Homo sapiens
  source 1..23: mol_type = other DNA
tggaggaaagccagtgagtcaag

SEQ ID NO: 1569 - DNA, 23 bp, Homo sapiens
  source 1..23: mol_type = other DNA
tagttaaaaaccagtgagtaaga

SEQ ID NO: 1570 - DNA, 23 bp, Homo sapiens
  source 1..23: mol_type = other DNA
ttaaggaacaccagtgagtctgg

SEQ ID NO: 1571 - DNA, 23 bp, Homo sapiens
  source 1..23: mol_type = other DNA
tacaggaaaaccagagaagtggg

SEQ ID NO: 1572 - DNA, 23 bp, Homo sapiens
  source 1..23: mol_type = other DNA
caaaggaaaaccagtgacaggtg

SEQ ID NO: 1573 - DNA, 22 bp, Homo sapiens
  source 1..22: mol_type = other DNA
tataagaaaccaatgtctctgg

SEQ ID NO: 1574 - DNA, 23 bp, Homo sapiens
  source 1..23: mol_type = other DNA
aataggaaaaccagagagcggac

SEQ ID NO: 1575 - DNA, 21 bp, Homo sapiens
  source 1..21: mol_type = other DNA
aataggaaaaccaggtactgg

SEQ ID NO: 1576 - DNA, 23 bp, Homo sapiens
  source 1..23: mol_type = other DNA
tataggtaaaccagtgtcatgag

SEQ ID NO: 1577 - DNA, 23 bp, Homo sapiens
  source 1..23: mol_type = other DNA
tgtaggaaaatcaatgaacaggg

SEQ ID NO: 1578 - DNA, 23 bp, Homo sapiens
  source 1..23: mol_type = other DNA
aagatcaaaaccagtgagtgagg

SEQ ID NO: 1579 - DNA, 22 bp, Homo sapiens
  source 1..22: mol_type = other DNA
ggtaggggaccagtgagtcagg

SEQ ID NO: 1580 - DNA, 23 bp, Homo sapiens
  source 1..23: mol_type = other DNA
ttgtggaaaaccactgagtttgg

SEQ ID NO: 1581 - DNA, 22 bp, Homo sapiens
  source 1..22: mol_type = other DNA
tacaggaaaacagtaattctgg

SEQ ID NO: 1582 - DNA, 23 bp, Homo sapiens
  source 1..23: mol_type = other DNA
tgaggtaaaaccagtgaggtagg

SEQ ID NO: 1583 - DNA, 23 bp, Homo sapiens
  source 1..23: mol_type = other DNA
aacaggaaaaccagtgtaatagg

SEQ ID NO: 1584 - DNA, 23 bp, Homo sapiens
  source 1..23: mol_type = other DNA
aaaaggcaaaccaatgagtggga

SEQ ID NO: 1585 - DNA, 21 bp, Homo sapiens
  source 1..21: mol_type = other DNA
cataggaaaaccagtatcaga

SEQ ID NO: 1586 - DNA, 23 bp, Homo sapiens
  source 1..23: mol_type = other DNA
tattataagaaaagtgagtctgg

SEQ ID NO: 1587 - DNA, 21 bp, Homo sapiens
  source 1..21: mol_type = other DNA
caaaggaaccagtgagttggg

SEQ ID NO: 1588 - DNA, 23 bp, Homo sapiens
  source 1..23: mol_type = other DNA
cttttgtaaaccagtgagtctgc

SEQ ID NO: 1589 - DNA, 23 bp, Homo sapiens
  source 1..23: mol_type = other DNA
aataagaaaaacagtgagtccag

SEQ ID NO: 1590 - DNA, 22 bp, Homo sapiens
  source 1..22: mol_type = other DNA
ggtatgaaatcagtgagtctgg

SEQ ID NO: 1591 - DNA, 23 bp, Homo sapiens
  source 1..23: mol_type = other DNA
agaagaaaaaccagagagtgagg

SEQ ID NO: 1592 - DNA, 23 bp, Homo sapiens
  source 1..23: mol_type = other DNA
tagaggacaatcagtgagtcaag

SEQ ID NO: 1593 - DNA, 22 bp, Homo sapiens
  source 1..22: mol_type = other DNA
ggtagggcaccagtgagtcagg

SEQ ID NO: 1594 - DNA, 22 bp, Homo sapiens
  source 1..22: mol_type = other DNA
tataggagaacagagagtttgg

SEQ ID NO: 1595 - DNA, 23 bp, Homo sapiens
  source 1..23: mol_type = other DNA
gataggaaagccagtggtttagg

SEQ ID NO: 1596 - DNA, 23 bp, Homo sapiens
  source 1..23: mol_type = other DNA
taaggaagaaccagtgaggtcgg

SEQ ID NO: 1597 - DNA, 22 bp, Homo sapiens
  source 1..22: mol_type = other DNA
aatatgaagccagtaagtcagg

SEQ ID NO: 1598 - DNA, 22 bp, Homo sapiens
  source 1..22: mol_type = other DNA
tataagaaaaccaggtgtcaga

SEQ ID NO: 1599 - DNA, 21 bp, Homo sapiens
  source 1..21: mol_type = other DNA
tataggaaaaagtgagatggg

SEQ ID NO: 1600 - DNA, 22 bp, Homo sapiens
  source 1..22: mol_type = other DNA
aataggaaaaaagtgaatgagg

SEQ ID NO: 1601 - DNA, 21 bp, Homo sapiens
  source 1..21: mol_type = other DNA
gataggaaaacctgaaactgg

SEQ ID NO: 1602 - DNA, 23 bp, Homo sapiens
  source 1..23: mol_type = other DNA
cagggggaaaccagtgagctggg

SEQ ID NO: 1603 - DNA, 22 bp, Homo sapiens
  source 1..22: mol_type = other DNA
tgcatcaaaaccagtgatcagg

SEQ ID NO: 1604 - DNA, 22 bp, Homo sapiens
  source 1..22: mol_type = other DNA
tctaggcaaccagtgagtatgg

SEQ ID NO: 1605 - DNA, 23 bp, Homo sapiens
  source 1..23: mol_type = other DNA
ttcttgaaaaccagtgagtggag

SEQ ID NO: 1606 - DNA, 23 bp, Homo sapiens
  source 1..23: mol_type = other DNA
tgagagaaagccagtgagttggg

SEQ ID NO: 1607 - DNA, 22 bp, Homo sapiens
  source 1..22: mol_type = other DNA
gataagcaaaccagtgaacggg

SEQ ID NO: 1608 - DNA, 22 bp, Homo sapiens
  source 1..22: mol_type = other DNA
tataggataccattgagtatag

SEQ ID NO: 1609 - DNA, 23 bp, Homo sapiens
  source 1..23: mol_type = other DNA
gatcagagcacctgtgagtcagg

SEQ ID NO: 1610 - DNA, 23 bp, Homo sapiens
  source 1..23: mol_type = other DNA
tatgaggaaaccagtgagggagc

SEQ ID NO: 1611 - DNA, 21 bp, Homo sapiens
  source 1..21: mol_type = other DNA
tgtaagaaaaccagtgtcaga

SEQ ID NO: 1612 - DNA, 23 bp, Homo sapiens
  source 1..23: mol_type = other DNA
taaaggaaaacctgagactgggt

SEQ ID NO: 1613 - DNA, 23 bp, Homo sapiens
  source 1..23: mol_type = other DNA
tctaaataaaccagtgattccag

SEQ ID NO: 1614 - DNA, 22 bp, Homo sapiens
  source 1..22: mol_type = other DNA
gctaggaaaaccagttgtaggg

SEQ ID NO: 1615 - DNA, 23 bp, Homo sapiens
  source 1..23: mol_type = other DNA
aatacgaaaaccagtgaggcgtg

SEQ ID NO: 1616 - DNA, 23 bp, Homo sapiens
  source 1..23: mol_type = other DNA
tttgggagaaccagtgagaagga

SEQ ID NO: 1617 - DNA, 23 bp, Homo sapiens
  source 1..23: mol_type = other DNA
tgggggaaagccagtgagctggg

SEQ ID NO: 1618 - DNA, 23 bp, Homo sapiens
  source 1..23: mol_type = other DNA
tatgagagaaccagtgaattggt

SEQ ID NO: 1619 - DNA, 22 bp, Homo sapiens
  source 1..22: mol_type = other DNA
ttgaggaaacacagtgagcggg

SEQ ID NO: 1620 - DNA, 23 bp, Homo sapiens
  source 1..23: mol_type = other DNA
ggtaaggagaccaatgagtcagg

SEQ ID NO: 1621 - DNA, 22 bp, Homo sapiens
  source 1..22: mol_type = other DNA
gataagaaaaccaagattcagg

SEQ ID NO: 1622 - DNA, 23 bp, Homo sapiens
  source 1..23: mol_type = other DNA
gaagggaaaaccagtgaatacag

SEQ ID NO: 1623 - DNA, 23 bp, Homo sapiens
  source 1..23: mol_type = other DNA
aatatggaaaccaatgagcatgg

SEQ ID NO: 1624 - DNA, 21 bp, Homo sapiens
  source 1..21: mol_type = other DNA
gaaaggaaacagtgattcagg

SEQ ID NO: 1625 - DNA, 23 bp, Homo sapiens
  source 1..23: mol_type = other DNA
tgcaaacaaaccaatgagtcagg

SEQ ID NO: 1626 - DNA, 22 bp, Homo sapiens
  source 1..22: mol_type = other DNA
tttaggctaccagtgagcctgg

SEQ ID NO: 1627 - DNA, 22 bp, Homo sapiens
  source 1..22: mol_type = other DNA
catggtaagaccagtagtcagg

SEQ ID NO: 1628 - DNA, 22 bp, Homo sapiens
  source 1..22: mol_type = other DNA
gacaggacaaacagtgagctgg

SEQ ID NO: 1629 - DNA, 23 bp, Homo sapiens
  source 1..23: mol_type = other DNA
tatgggaaaacaagtggttctgc

SEQ ID NO: 1630 - DNA, 23 bp, Homo sapiens
  source 1..23: mol_type = other DNA
aagctgaaaaccagtgaggttgg

SEQ ID NO: 1631 - DNA, 23 bp, Homo sapiens
  source 1..23: mol_type = other DNA
tagaggagaaccaggaattctgt

SEQ ID NO: 1632 - DNA, 24 bp, Homo sapiens
  source 1..24: mol_type = other DNA
gcaaggaaaaccacgtgagactgg

SEQ ID NO: 1633 - DNA, 23 bp, Homo sapiens
  source 1..23: mol_type = other DNA
aatagggaggccagtgagtatgg

SEQ ID NO: 1634 - DNA, 23 bp, Homo sapiens
  source 1..23: mol_type = other DNA
cagagggaagccagtgaggctgt

SEQ ID NO: 1635 - DNA, 23 bp, Homo sapiens
  source 1..23: mol_type = other DNA
tataggaatgcaagtgatttttg

SEQ ID NO: 1636 - DNA, 23 bp, Homo sapiens
  source 1..23: mol_type = other DNA
cataggaaaacacctgagcctgg

SEQ ID NO: 1637 - DNA, 23 bp, Homo sapiens
  source 1..23: mol_type = other DNA
tataggaatactagcgatttttg

SEQ ID NO: 1638 - DNA, 23 bp, Homo sapiens
  source 1..23: mol_type = other DNA
aagagcagtaccagtgagttagg

SEQ ID NO: 1639 - DNA, 23 bp, Homo sapiens
  source 1..23: mol_type = other DNA
tgaggggtaacctgtgagtctgg

SEQ ID NO: 1640 - DNA, 24 bp, Homo sapiens
  source 1..24: mol_type = other DNA
aagaggaaaaccaggagagtgggg

SEQ ID NO: 1641 - DNA, 22 bp, Homo sapiens
  source 1..22: mol_type = other DNA
tatgtaaatccagtgagttaga

SEQ ID NO: 1642 - DNA, 22 bp, Homo sapiens
  source 1..22: mol_type = other DNA
gatgggaaaactactgatcagg

SEQ ID NO: 1643 - DNA, 22 bp, Homo sapiens
  source 1..22: mol_type = other DNA
tatatgaaaccagtaagtctaa

SEQ ID NO: 1644 - DNA, 23 bp, Homo sapiens
  source 1..23: mol_type = other DNA
aaaaagaaaagcagtgagtgggc

SEQ ID NO: 1645 - DNA, 23 bp, Homo sapiens
  source 1..23: mol_type = other DNA
tgtagggaaaccagaacttcagg

SEQ ID NO: 1646 - DNA, 23 bp, Homo sapiens
  source 1..23: mol_type = other DNA
catggaacaaccagtaagtcaag

SEQ ID NO: 1647 - DNA, 23 bp, Homo sapiens
  source 1..23: mol_type = other DNA
tgtaggtgattcagtgagttagg

SEQ ID NO: 1648 - DNA, 23 bp, Homo sapiens
  source 1..23: mol_type = other DNA
gagaggaagaccacagagtaagg

SEQ ID NO: 1649 - DNA, 22 bp, Homo sapiens
  source 1..22: mol_type = other DNA
aactggaaatccaggagtctgg

SEQ ID NO: 1650 - DNA, 23 bp, Homo sapiens
  source 1..23: mol_type = other DNA
tatgtaaaaactagtgagtgagg

SEQ ID NO: 1651 - DNA, 23 bp, Homo sapiens
  source 1..23: mol_type = other DNA
aataggaaatggagagagactgg

SEQ ID NO: 1652 - DNA, 23 bp, Homo sapiens
  source 1..23: mol_type = other DNA
cagcaaaaaaccagtgagactgg

SEQ ID NO: 1653 - DNA, 23 bp, Homo sapiens
  source 1..23: mol_type = other DNA
agcaggaaaaccactgggtcctg

SEQ ID NO: 1654 - DNA, 23 bp, Homo sapiens
  source 1..23: mol_type = other DNA
tatatgaaaagcagtgagtcagc

SEQ ID NO: 1655 - DNA, 23 bp, Homo sapiens
  source 1..23: mol_type = other DNA
tataagggaactagtgagccaag

SEQ ID NO: 1656 - DNA, 23 bp, Homo sapiens
  source 1..23: mol_type = other DNA
tataggaaaaacagtgctcttgg

SEQ ID NO: 1657 - DNA, 24 bp, Homo sapiens
  source 1..24: mol_type = other DNA
tataggcaatgccagtgagtgcga

SEQ ID NO: 1658 - DNA, 21 bp, Homo sapiens
  source 1..21: mol_type = other DNA
tatagaaaccaatgagtattg

SEQ ID NO: 1659 - DNA, 21 bp, Homo sapiens
  source 1..21: mol_type = other DNA
tgtaggaaaaccagtctctag

SEQ ID NO: 1660 - DNA, 23 bp, Homo sapiens
  source 1..23: mol_type = other DNA
tagggcaaacacagtgagtatgg

SEQ ID NO: 1661 - DNA, 23 bp, Homo sapiens
  source 1..23: mol_type = other DNA
tattggcaaggcagtgtgccagg

SEQ ID NO: 1662 - DNA, 23 bp, Homo sapiens
  source 1..23: mol_type = other DNA
cacaggcaacccagggagtcgag

SEQ ID NO: 1663 - DNA, 23 bp, Homo sapiens
  source 1..23: mol_type = other DNA
aatataataaccagtgaatctgg

SEQ ID NO: 1664 - DNA, 23 bp, Homo sapiens
  source 1..23: mol_type = other DNA
tattagttaaacaatgagtcagg

SEQ ID NO: 1665 - DNA, 23 bp, Homo sapiens
  source 1..23: mol_type = other DNA
tataaggaaaccagtcatactgg

SEQ ID NO: 1666 - DNA, 23 bp, Homo sapiens
  source 1..23: mol_type = other DNA
tataggaatacctgtgatatttg

SEQ ID NO: 1667 - DNA, 23 bp, Homo sapiens
  source 1..23: mol_type = other DNA
caaaggaaaaacagtgagttgat

SEQ ID NO: 1668 - DNA, 23 bp, Homo sapiens
  source 1..23: mol_type = other DNA
tgaaggaaaagaagtgaatcagg

SEQ ID NO: 1669 - DNA, 23 bp, Homo sapiens
  source 1..23: mol_type = other DNA
gataggaaaacctatgattttgg

SEQ ID NO: 1670 - DNA, 22 bp, Homo sapiens
  source 1..22: mol_type = other DNA
tatagaggatcagtgagtctag

SEQ ID NO: 1671 - DNA, 22 bp, Homo sapiens
  source 1..22: mol_type = other DNA
tataagagagccagtgagctga

SEQ ID NO: 1672 - DNA, 21 bp, Homo sapiens
  source 1..21: mol_type = other DNA
aatagaaagaccagtgtctgg

SEQ ID NO: 1673 - DNA, 23 bp, Homo sapiens
  source 1..23: mol_type = other DNA
tgtaggaaaaccagtgaagctct

SEQ ID NO: 1674 - DNA, 23 bp, Homo sapiens
  source 1..23: mol_type = other DNA
aacaggaaaaccagttggtgggt

SEQ ID NO: 1675 - DNA, 23 bp, Homo sapiens
  source 1..23: mol_type = other DNA
tttaggaattccagtgattttga

SEQ ID NO: 1676 - DNA, 23 bp, Homo sapiens
  source 1..23: mol_type = other DNA
tatataaacaccagagagactgt

SEQ ID NO: 1677 - DNA, 23 bp, Homo sapiens
  source 1..23: mol_type = other DNA
tatagaaagtacagtgattctgg

SEQ ID NO: 1678 - DNA, 23 bp, Homo sapiens
  source 1..23: mol_type = other DNA
tatagtggaaccagtgtgtaagt

SEQ ID NO: 1679 - DNA, 23 bp, Homo sapiens
  source 1..23: mol_type = other DNA
tttagaaaaagcagagagtccta

SEQ ID NO: 1680 - DNA, 23 bp, Homo sapiens
  source 1..23: mol_type = other DNA
aatagttaaaacagtgagaccgg

SEQ ID NO: 1681 - DNA, 23 bp, Homo sapiens
  source 1..23: mol_type = other DNA
cctaggaaatccagctagtcctg

SEQ ID NO: 1682 - DNA, 23 bp, Homo sapiens
  source 1..23: mol_type = other DNA
tatgaataagccagtgattcagg

SEQ ID NO: 1683 - DNA, 23 bp, Homo sapiens
  source 1..23: mol_type = other DNA
tataaaggaaccagtgataccgg

SEQ ID NO: 1684 - DNA, 23 bp, Homo sapiens
  source 1..23: mol_type = other DNA
tgtactaaaaccagtgacttacg

SEQ ID NO: 1685 - DNA, 23 bp, Homo sapiens
  source 1..23: mol_type = other DNA
aatatgtaaacaagtgagcatgg

SEQ ID NO: 1686 - DNA, 23 bp, Homo sapiens
  source 1..23: mol_type = other DNA
tataggaaaacttgtgtcatggg

SEQ ID NO: 1687 - DNA, 23 bp, Homo sapiens
  source 1..23: mol_type = other DNA
tataggaaataaagtgaataagg

SEQ ID NO: 1688 - DNA, 24 bp, Homo sapiens
  source 1..24: mol_type = other DNA
tataggaaaacaagttgtctctgg

SEQ ID NO: 1689 - DNA, 22 bp, Homo sapiens
  source 1..22: mol_type = other DNA
tataggaaaaccatgggacaaa

SEQ ID NO: 1690 - DNA, 22 bp, Homo sapiens
  source 1..22: mol_type = other DNA
tatagggaaactagtagcaggg

SEQ ID NO: 1691 - DNA, 21 bp, Homo sapiens
  source 1..21: mol_type = other DNA
tgtaggaaaaagtgattccag

SEQ ID NO: 1692 - DNA, 21 bp, Homo sapiens
  source 1..21: mol_type = other DNA
gataggaaaacaagtgcctgg

SEQ ID NO: 1693 - DNA, 22 bp, Homo sapiens
  source 1..22: mol_type = other DNA
taaagaaaatgcagtggtcggg

SEQ ID NO: 1694 - DNA, 22 bp, Homo sapiens
  source 1..22: mol_type = other DNA
aatagaaaaaccactggtcaga

SEQ ID NO: 1695 - DNA, 23 bp, Homo sapiens
  source 1..23: mol_type = other DNA
cacaggaaaagcaatgagaccag

SEQ ID NO: 1696 - DNA, 23 bp, Homo sapiens
  source 1..23: mol_type = other DNA
aataggagaaagagagagtgagg

SEQ ID NO: 1697 - DNA, 23 bp, Homo sapiens
  source 1..23: mol_type = other DNA
tataggtaaacccatgtcacagg

SEQ ID NO: 1698 - DNA, 23 bp, Homo sapiens
  source 1..23: mol_type = other DNA
cctaacaaaactagtgtgtctgg

SEQ ID NO: 1699 - DNA, 23 bp, Homo sapiens
  source 1..23: mol_type = other DNA
cagagtaaaacaggtgaggcagg

SEQ ID NO: 1700 - DNA, 23 bp, Homo sapiens
  source 1..23: mol_type = other DNA
taaaggaaaacaaatgggccatg

SEQ ID NO: 1701 - DNA, 23 bp, Homo sapiens
  source 1..23: mol_type = other DNA
tataataaaaccagtgacaaagt

SEQ ID NO: 1702 - DNA, 23 bp, Homo sapiens
  source 1..23: mol_type = other DNA
tatagcaaaacacctgagactgg

SEQ ID NO: 1703 - DNA, 23 bp, Homo sapiens
  source 1..23: mol_type = other DNA
cagaggaaaagcagagagccttg

SEQ ID NO: 1704 - DNA, 23 bp, Homo sapiens
  source 1..23: mol_type = other DNA
cttaggaaaaccaatgagagaag

SEQ ID NO: 1705 - DNA, 23 bp, Homo sapiens
  source 1..23: mol_type = other DNA
cttaggaaaaccaaaaattctgg

SEQ ID NO: 1706 - DNA, 23 bp, Homo sapiens
  source 1..23: mol_type = other DNA
tataggaaaatcagtgagaactc

SEQ ID NO: 1707 - DNA, 23 bp, Homo sapiens
  source 1..23: mol_type = other DNA
tataggtaatctagtgagacagc

SEQ ID NO: 1708 - DNA, 23 bp, Homo sapiens
  source 1..23: mol_type = other DNA
agtaggaaaacctgggagttgga

SEQ ID NO: 1709 - DNA, 23 bp, Homo sapiens
  source 1..23: mol_type = other DNA
tctacaaaaaacagttaggctgg

SEQ ID NO: 1710 - DNA, 23 bp, Homo sapiens
  source 1..23: mol_type = other DNA
tgtaaggaaaccagtcagattgg

SEQ ID NO: 1711 - DNA, 24 bp, Homo sapiens
  source 1..24: mol_type = other DNA
tatgggaaaagccagtgaggcaag

SEQ ID NO: 1712 - DNA, 22 bp, Homo sapiens
  source 1..22: mol_type = other DNA
catagtaaaaacatgtgtcagg

SEQ ID NO: 1713 - DNA, 22 bp, Homo sapiens
  source 1..22: mol_type = other DNA
tgtatgcaaaccaggggtcagg

SEQ ID NO: 1714 - DNA, 22 bp, Homo sapiens
  source 1..22: mol_type = other DNA
tataggtaaaacagtaggctgc

SEQ ID NO: 1715 - DNA, 22 bp, Homo sapiens
  source 1..22: mol_type = other DNA
cataagaaaaccagtgttcagt

SEQ ID NO: 1716 - DNA, 21 bp, Homo sapiens
  source 1..21: mol_type = other DNA
taaaggaaaaagtgagtttag

SEQ ID NO: 1717 - DNA, 23 bp, Homo sapiens
  source 1..23: mol_type = other DNA
tgtaggaaaaccagtaagtaggt

SEQ ID NO: 1718 - DNA, 22 bp, Homo sapiens
  source 1..22: mol_type = other DNA
cataggaaaccaatgagctagg

SEQ ID NO: 1719 - DNA, 22 bp, Homo sapiens
  source 1..22: mol_type = other DNA
tgtaggtaacctttgagtcagg

SEQ ID NO: 1720 - DNA, 23 bp, Homo sapiens
  source 1..23: mol_type = other DNA
gacaggaaaaccagtgagtaggc

SEQ ID NO: 1721 - DNA, 22 bp, Homo sapiens
  source 1..22: mol_type = other DNA
tgtaggaaatcaatgagtcaag

SEQ ID NO: 1722 - DNA, 23 bp, Homo sapiens
  source 1..23: mol_type = other DNA
tataagataaccagtgaatctgt

SEQ ID NO: 1723 - DNA, 24 bp, Homo sapiens
  source 1..24: mol_type = other DNA
tatagtaaaaccgagtgagcagga

SEQ ID NO: 1724 - DNA, 23 bp, Homo sapiens
  source 1..23: mol_type = other DNA
attaggaaaaccagttagtagga

SEQ ID NO: 1725 - DNA, 21 bp, Homo sapiens
  source 1..21: mol_type = other DNA
attaggaaaaccagtgaaagg

SEQ ID NO: 1726 - DNA, 22 bp, Homo sapiens
  source 1..22: mol_type = other DNA
cataggaaaaccaatgtactgg

SEQ ID NO: 1727 - DNA, 23 bp, Homo sapiens
  source 1..23: mol_type = other DNA
aatgggaaaaccagtgagacggg

SEQ ID NO: 1728 - DNA, 24 bp, Homo sapiens
  source 1..24: mol_type = other DNA
tataggttaaaccagtgattgggt

SEQ ID NO: 1729 - DNA, 22 bp, Homo sapiens
  source 1..22: mol_type = other DNA
tatttaaaaccagtgagtttgg

SEQ ID NO: 1730 - DNA, 22 bp, Homo sapiens
  source 1..22: mol_type = other DNA
gatagggaaacctgtgatctgg

SEQ ID NO: 1731 - DNA, 23 bp, Homo sapiens
  source 1..23: mol_type = other DNA
agtaggaaagccagtgagcaaga

SEQ ID NO: 1732 - DNA, 23 bp, Homo sapiens
  source 1..23: mol_type = other DNA
tataagaaaaccagttataagga

SEQ ID NO: 1733 - DNA, 22 bp, Homo sapiens
  source 1..22: mol_type = other DNA
tgtagtaaaaccaggaatcaag

SEQ ID NO: 1734 - DNA, 23 bp, Homo sapiens
  source 1..23: mol_type = other DNA
aatagtaaaatcagtgagtggtt

SEQ ID NO: 1735 - DNA, 21 bp, Homo sapiens
  source 1..21: mol_type = other DNA
tctaggaaacagtgagtcatg

SEQ ID NO: 1736 - DNA, 22 bp, Homo sapiens
  source 1..22: mol_type = other DNA
aatagtgaaaccagaagtcagg

SEQ ID NO: 1737 - DNA, 22 bp, Homo sapiens
  source 1..22: mol_type = other DNA
cttaggaaaatcaggtgtcagg

SEQ ID NO: 1738 - DNA, 22 bp, Homo sapiens
  source 1..22: mol_type = other DNA
tatagtaaaaccagagatctga

SEQ ID NO: 1739 - DNA, 22 bp, Homo sapiens
  source 1..22: mol_type = other DNA
tgtaggagaaacatgagtctgg

SEQ ID NO: 1740 - DNA, 23 bp, Homo sapiens
  source 1..23: mol_type = other DNA
tataagataaccactgagtctga

SEQ ID NO: 1741 - DNA, 23 bp, Homo sapiens
  source 1..23: mol_type = other DNA
tgaaggaaaaccagggagctgga

SEQ ID NO: 1742 - DNA, 23 bp, Homo sapiens
  source 1..23: mol_type = other DNA
aattataaaaccagagagtcatg

SEQ ID NO: 1743 - DNA, 23 bp, Homo sapiens
  source 1..23: mol_type = other DNA
aataggataaccaattagttggt

SEQ ID NO: 1744 - DNA, 23 bp, Homo sapiens
  source 1..23: mol_type = other DNA
tgtaggagaaccaatgatttcag

SEQ ID NO: 1745 - DNA, 23 bp, Homo sapiens
  source 1..23: mol_type = other DNA
ccaaaggaaaccagtgagtccga

SEQ ID NO: 1746 - DNA, 23 bp, Homo sapiens
  source 1..23: mol_type = other DNA
aaatggaaaaccagtgagcaggg

SEQ ID NO: 1747 - DNA, 22 bp, Homo sapiens
  source 1..22: mol_type = other DNA
ttgaggaaaaccagtatttagg

SEQ ID NO: 1748 - DNA, 23 bp, Homo sapiens
  source 1..23: mol_type = other DNA
tatagataaaccagtgtcatggg

SEQ ID NO: 1749 - DNA, 22 bp, Homo sapiens
  source 1..22: mol_type = other DNA
agtttgaaaaccagtggtcagg

SEQ ID NO: 1750 - DNA, 22 bp, Homo sapiens
  source 1..22: mol_type = other DNA
tataggtcagccagtaatcagg

SEQ ID NO: 1751 - DNA, 21 bp, Homo sapiens
  source 1..21: mol_type = other DNA
aataggaaaacctgtgtcagg

SEQ ID NO: 1752 - DNA, 22 bp, Homo sapiens
  source 1..22: mol_type = other DNA
tatagaaaaacagagagtcaga

SEQ ID NO: 1753 - DNA, 23 bp, Homo sapiens
  source 1..23: mol_type = other DNA
aataagagaaccagtgaaatggg

SEQ ID NO: 1754 - DNA, 21 bp, Homo sapiens
  source 1..21: mol_type = other DNA
aataggtcacagtgagtcagg

SEQ ID NO: 1755 - DNA, 23 bp, Homo sapiens
  source 1..23: mol_type = other DNA
acaaggaaaaacagtgagtaagt

SEQ ID NO: 1756 - DNA, 23 bp, Homo sapiens
  source 1..23: mol_type = other DNA
tgaaggaaaactagtgagacaag

SEQ ID NO: 1757 - DNA, 22 bp, Homo sapiens
  source 1..22: mol_type = other DNA
tatagggtagcaatgagtcagg

SEQ ID NO: 1758 - DNA, 24 bp, Homo sapiens
  source 1..24: mol_type = other DNA
tatagtgaaaaccaatgaatctag

SEQ ID NO: 1759 - DNA, 22 bp, Homo sapiens
  source 1..22: mol_type = other DNA
tgtaggaataccagaggttggg

SEQ ID NO: 1760 - DNA, 23 bp, Homo sapiens
  source 1..23: mol_type = other DNA
tataagattaccagtgaatctgt

SEQ ID NO: 1761 - DNA, 22 bp, Homo sapiens
  source 1..22: mol_type = other DNA
tacaggaaaccagtgagggctg

SEQ ID NO: 1762 - DNA, 22 bp, Homo sapiens
  source 1..22: mol_type = other DNA
aaaattaaaaccagtggtctgg

SEQ ID NO: 1763 - DNA, 22 bp, Homo sapiens
  source 1..22: mol_type = other DNA
gacagaaaaccagagagtaggg

SEQ ID NO: 1764 - DNA, 22 bp, Homo sapiens
  source 1..22: mol_type = other DNA
tttagtaaaaccactggtctgg

SEQ ID NO: 1765 - DNA, 23 bp, Homo sapiens
  source 1..23: mol_type = other DNA
tataggaaaacttatgagtagga

SEQ ID NO: 1766 - DNA, 23 bp, Homo sapiens
  source 1..23: mol_type = other DNA
attaagaaaaccagtatctctgg

SEQ ID NO: 1767 - DNA, 22 bp, Homo sapiens
  source 1..22: mol_type = other DNA
tatagggaaaaagtgagtcaga

SEQ ID NO: 1768 - DNA, 21 bp, Homo sapiens
  source 1..21: mol_type = other DNA
tataggtaccactgagcctgg

SEQ ID NO: 1769 - DNA, 23 bp, Homo sapiens
  source 1..23: mol_type = other DNA
tatagtaaaaccagtaggtggca

SEQ ID NO: 1770 - DNA, 22 bp, Homo sapiens
  source 1..22: mol_type = other DNA
tgtagaacaccattaagtctgg

SEQ ID NO: 1771 - DNA, 22 bp, Homo sapiens
  source 1..22: mol_type = other DNA
gttaggagaaacagtgatcagg

SEQ ID NO: 1772 - DNA, 22 bp, Homo sapiens
  source 1..22: mol_type = other DNA
gagaggaaaaccaggagtaagg

SEQ ID NO: 1773 - DNA, 24 bp, Homo sapiens
  source 1..24: mol_type = other DNA
tataggaaataccagagagaaggg

SEQ ID NO: 1774 - DNA, 23 bp, Homo sapiens
  source 1..23: mol_type = other DNA
tgtatgaaaatcagtaagtcggc

SEQ ID NO: 1775 - DNA, 22 bp, Homo sapiens
  source 1..22: mol_type = other DNA
cagaggaaaaccaatgctcagg

SEQ ID NO: 1776 - DNA, 23 bp, Homo sapiens
  source 1..23: mol_type = other DNA
taggggaaagccagtgagccagg

SEQ ID NO: 1777 - DNA, 24 bp, Homo sapiens
  source 1..24: mol_type = other DNA
gatagggaagaccaatgagtttgg

SEQ ID NO: 1778 - DNA, 22 bp, Homo sapiens
  source 1..22: mol_type = other DNA
tctaataaacaagtgagtcagg

SEQ ID NO: 1779 - DNA, 21 bp, Homo sapiens
  source 1..21: mol_type = other DNA
tatagatcaaccagtgtcagg

SEQ ID NO: 1780 - DNA, 23 bp, Homo sapiens
  source 1..23: mol_type = other DNA
aataggaaaaacagtgaaatgag

SEQ ID NO: 1781 - DNA, 24 bp, Homo sapiens
  source 1..24: mol_type = other DNA
aataggagaatcagtgtattcagg

SEQ ID NO: 1782 - DNA, 23 bp, Homo sapiens
  source 1..23: mol_type = other DNA
ctaaggaacaccagtgagtctgg

SEQ ID NO: 1783 - DNA, 22 bp, Homo sapiens
  source 1..22: mol_type = other DNA
tctaggtacacagtgagtcatg

SEQ ID NO: 1784 - DNA, 22 bp, Homo sapiens
  source 1..22: mol_type = other DNA
tatagtaaaaccatgagtatag

SEQ ID NO: 1785 - DNA, 22 bp, Homo sapiens
  source 1..22: mol_type = other DNA
tcatggaaaaccatgagtatgg

SEQ ID NO: 1786 - DNA, 23 bp, Homo sapiens
  source 1..23: mol_type = other DNA
tacaggaaaatgagtgagtccgg

SEQ ID NO: 1787 - DNA, 22 bp, Homo sapiens
  source 1..22: mol_type = other DNA
gatatgaaaacagtgagtgagt

SEQ ID NO: 1788 - DNA, 21 bp, Homo sapiens
  source 1..21: mol_type = other DNA
tttaaaaaccactgagtcaga

SEQ ID NO: 1789 - DNA, 21 bp, Homo sapiens
  source 1..21: mol_type = other DNA
gaaaggaaacagtaagtcagg

SEQ ID NO: 1790 - DNA, 21 bp, Homo sapiens
  source 1..21: mol_type = other DNA
aatagaaaccagtgggtcaag

SEQ ID NO: 1791 - DNA, 23 bp, Homo sapiens
  source 1..23: mol_type = other DNA
agaaagaaaaccacagagtcggg

SEQ ID NO: 1792 - DNA, 23 bp, Homo sapiens
  source 1..23: mol_type = other DNA
tataggaaaacaggtgaccaggg

SEQ ID NO: 1793 - DNA, 23 bp, Homo sapiens
  source 1..23: mol_type = other DNA
cataagaaaaccaatgaataaga

SEQ ID NO: 1794 - DNA, 22 bp, Homo sapiens
  source 1..22: mol_type = other DNA
tgtagaacaaccagtagtctgc

SEQ ID NO: 1795 - DNA, 23 bp, Homo sapiens
  source 1..23: mol_type = other DNA
tataggtaaactagtggcatggg

SEQ ID NO: 1796 - DNA, 22 bp, Homo sapiens
  source 1..22: mol_type = other DNA
aataggaaacaagtgtgtcatg

SEQ ID NO: 1797 - DNA, 23 bp, Homo sapiens
  source 1..23: mol_type = other DNA
tataggtaaacaagtgagatggt

SEQ ID NO: 1798 - DNA, 23 bp, Homo sapiens
  source 1..23: mol_type = other DNA
aatagtaagacctgtgagtaaag

SEQ ID NO: 1799 - DNA, 22 bp, Homo sapiens
  source 1..22: mol_type = other DNA
aaaaggaaaaccaagaatcagg

SEQ ID NO: 1800 - DNA, 23 bp, Homo sapiens
  source 1..23: mol_type = other DNA
tagaggaaggccagtgagtcgag

SEQ ID NO: 1801 - DNA, 22 bp, Homo sapiens
  source 1..22: mol_type = other DNA
tctgagaaaaccagtagtaagg

SEQ ID NO: 1802 - DNA, 23 bp, Homo sapiens
  source 1..23: mol_type = other DNA
gaaagggaaaccagtgaggtagg

SEQ ID NO: 1803 - DNA, 22 bp, Homo sapiens
  source 1..22: mol_type = other DNA
tatccaaaaaccagagatccgg

SEQ ID NO: 1804 - DNA, 24 bp, Homo sapiens
  source 1..24: mol_type = other DNA
tgaaggaaacccagtgaagtctgg

SEQ ID NO: 1805 - DNA, 21 bp, Homo sapiens
  source 1..21: mol_type = other DNA
cactggaaacagtgagtccgg

SEQ ID NO: 1806 - DNA, 22 bp, Homo sapiens
  source 1..22: mol_type = other DNA
aatatgaaaccagtgagtatgc

SEQ ID NO: 1807 - DNA, 22 bp, Homo sapiens
  source 1..22: mol_type = other DNA
gctaggaaaccagtgaggacgg

SEQ ID NO: 1808 - DNA, 22 bp, Homo sapiens
  source 1..22: mol_type = other DNA
accaggaataccagtagtctgg

SEQ ID NO: 1809 - DNA, 23 bp, Homo sapiens
  source 1..23: mol_type = other DNA
cagaggaaaaacactgagtcagg

SEQ ID NO: 1810 - DNA, 23 bp, Homo sapiens
  source 1..23: mol_type = other DNA
ttcctgaaaaccaatgagtcaga

SEQ ID NO: 1811 - DNA, 23 bp, Homo sapiens
  source 1..23: mol_type = other DNA
aagataagaaccagtgagactgg

SEQ ID NO: 1812 - DNA, 23 bp, Homo sapiens
  source 1..23: mol_type = other DNA
agggggataaccactgagtcagg

SEQ ID NO: 1813 - DNA, 22 bp, Homo sapiens
  source 1..22: mol_type = other DNA
tggagaaaaccagtgagtgtag

SEQ ID NO: 1814 - DNA, 23 bp, Homo sapiens
  source 1..23: mol_type = other DNA
tctaagaaaactagagagtgggt

SEQ ID NO: 1815 - DNA, 23 bp, Homo sapiens
  source 1..23: mol_type = other DNA
tgaactaaaaccagtaagtcagg

SEQ ID NO: 1816 - DNA, 23 bp, Homo sapiens
  source 1..23: mol_type = other DNA
cagaagaaaaccagtgagtttga

SEQ ID NO: 1817 - DNA, 23 bp, Homo sapiens
  source 1..23: mol_type = other DNA
tataggtaaacaggtgtcacggg

SEQ ID NO: 1818 - DNA, 23 bp, Homo sapiens
  source 1..23: mol_type = other DNA
ttcagggataccagtgagtcata

SEQ ID NO: 1819 - DNA, 23 bp, Homo sapiens
  source 1..23: mol_type = other DNA
aaaaggaaaaaaagtgagtctgg

SEQ ID NO: 1820 - DNA, 23 bp, Homo sapiens
  source 1..23: mol_type = other DNA
tagagataaacgggtgagtcggt

SEQ ID NO: 1821 - DNA, 22 bp, Homo sapiens
  source 1..22: mol_type = other DNA
tataggaaagccaatagtaggt

SEQ ID NO: 1822 - DNA, 22 bp, Homo sapiens
  source 1..22: mol_type = other DNA
tatagattacaagtgagtttgg

SEQ ID NO: 1823 - DNA, 23 bp, Homo sapiens
  source 1..23: mol_type = other DNA
ataagtaaaaccagtgattcatg

SEQ ID NO: 1824 - DNA, 23 bp, Homo sapiens
  source 1..23: mol_type = other DNA
cagaaaaaaatcagtgagtcagg

SEQ ID NO: 1825 - DNA, 23 bp, Homo sapiens
  source 1..23: mol_type = other DNA
actaggagaactaatgagtgggg

SEQ ID NO: 1826 - DNA, 23 bp, Homo sapiens
  source 1..23: mol_type = other DNA
ggtaggatagccagtgagatggg

SEQ ID NO: 1827 - DNA, 23 bp, Homo sapiens
  source 1..23: mol_type = other DNA
tataggaatgtcagtgatttttg

SEQ ID NO: 1828 - DNA, 23 bp, Homo sapiens
  source 1..23: mol_type = other DNA
tataggaagaccagagagcaata

SEQ ID NO: 1829 - DNA, 23 bp, Homo sapiens
  source 1..23: mol_type = other DNA
cttaagaaaactagtaagtctga

SEQ ID NO: 1830 - DNA, 23 bp, Homo sapiens
  source 1..23: mol_type = other DNA
actgagaaaaccagagaggctgg

SEQ ID NO: 1831 - DNA, 22 bp, Homo sapiens
  source 1..22: mol_type = other DNA
aatatgaatccagtgagtctga

SEQ ID NO: 1832 - DNA, 23 bp, Homo sapiens
  source 1..23: mol_type = other DNA
aataggaaaacaaatgagcctgc

SEQ ID NO: 1833 - DNA, 23 bp, Homo sapiens
  source 1..23: mol_type = other DNA
tataggaaagcaagggagaaggc

SEQ ID NO: 1834 - DNA, 23 bp, Homo sapiens
  source 1..23: mol_type = other DNA
tataggaacaccagtaattggat

SEQ ID NO: 1835 - DNA, 23 bp, Homo sapiens
  source 1..23: mol_type = other DNA
tataggaaaaatagtgttttggt

SEQ ID NO: 1836 - DNA, 23 bp, Homo sapiens
  source 1..23: mol_type = other DNA
aataggaataccactgaatctgt

SEQ ID NO: 1837 - DNA, 22 bp, Homo sapiens
  source 1..22: mol_type = other DNA
tctagaaaagcagtgattctgg

SEQ ID NO: 1838 - DNA, 22 bp, Homo sapiens
  source 1..22: mol_type = other DNA
aaaaggaaaactgtaagtcagg

SEQ ID NO: 1839 - DNA, 23 bp, Homo sapiens
  source 1..23: mol_type = other DNA
attggttaatccagtgagtctgg

SEQ ID NO: 1840 - DNA, 23 bp, Homo sapiens
  source 1..23: mol_type = other DNA
taaaggaataccagagactgggt

SEQ ID NO: 1841 - DNA, 23 bp, Homo sapiens
  source 1..23: mol_type = other DNA
tataggagaatcagtaaatctga

SEQ ID NO: 1842 - DNA, 23 bp, Homo sapiens
  source 1..23: mol_type = other DNA
aatggaaaaaccaggaagtctgg

SEQ ID NO: 1843 - DNA, 23 bp, Homo sapiens
  source 1..23: mol_type = other DNA
tacaggaaaaacagttattcaat

SEQ ID NO: 1844 - DNA, 23 bp, Homo sapiens
  source 1..23: mol_type = other DNA
tatgggaaaaaaagagattcgga

SEQ ID NO: 1845 - DNA, 23 bp, Homo sapiens
  source 1..23: mol_type = other DNA
aattggaaaaacagagagtcaac

SEQ ID NO: 1846 - DNA, 23 bp, Homo sapiens
  source 1..23: mol_type = other DNA
tataggtaaactagtgtcatggg

SEQ ID NO: 1847 - DNA, 23 bp, Homo sapiens
  source 1..23: mol_type = other DNA
aatagaaaaactagtgagattag

SEQ ID NO: 1848 - DNA, 23 bp, Homo sapiens
  source 1..23: mol_type = other DNA
tgtaggcaaactagtggttgggg

SEQ ID NO: 1849 - DNA, 23 bp, Homo sapiens
  source 1..23: mol_type = other DNA
tataggaaaacttgtaaatctaa

SEQ ID NO: 1850 - DNA, 24 bp, Homo sapiens
  source 1..24: mol_type = other DNA
tttaggaaaaccaagtgcttctga

SEQ ID NO: 1851 - DNA, 24 bp, Homo sapiens
  source 1..24: mol_type = other DNA
aatagaaaaaccagttgagtcttt

SEQ ID NO: 1852 - DNA, 22 bp, Homo sapiens
  source 1..22: mol_type = other DNA
tataataaatcagtgagtctga

SEQ ID NO: 1853 - DNA, 22 bp, Homo sapiens
  source 1..22: mol_type = other DNA
aatataaaaccagtgagggagg

SEQ ID NO: 1854 - DNA, 22 bp, Homo sapiens
  source 1..22: mol_type = other DNA
tagaggtacccaatgagtctgg

SEQ ID NO: 1855 - DNA, 22 bp, Homo sapiens
  source 1..22: mol_type = other DNA
aataggaaaccatttagttagg

SEQ ID NO: 1856 - DNA, 22 bp, Homo sapiens
  source 1..22: mol_type = other DNA
tgcaggaagccagtgaatcagg

SEQ ID NO: 1857 - DNA, 21 bp, Homo sapiens
  source 1..21: mol_type = other DNA
tgtaggaatacctgagactgg

SEQ ID NO: 1858 - DNA, 21 bp, Homo sapiens
  source 1..21: mol_type = other DNA
tttaaaaatcagtaagtctgg

SEQ ID NO: 1859 - DNA, 23 bp, Homo sapiens
  source 1..23: mol_type = other DNA
tatagagaaacaagtgagcccag

SEQ ID NO: 1860 - DNA, 23 bp, Homo sapiens
  source 1..23: mol_type = other DNA
aatagcaaaacaagagagtgtgt

SEQ ID NO: 1861 - DNA, 23 bp, Homo sapiens
  source 1..23: mol_type = other DNA
tggagaaaagccagtgagtagag

SEQ ID NO: 1862 - DNA, 23 bp, Homo sapiens
  source 1..23: mol_type = other DNA
tatactaaaaccaatgagttgta

SEQ ID NO: 1863 - DNA, 23 bp, Homo sapiens
  source 1..23: mol_type = other DNA
tgtaggaaaacaagaaaaactgg

SEQ ID NO: 1864 - DNA, 23 bp, Homo sapiens
  source 1..23: mol_type = other DNA
tataggaaaattagacattaagg

SEQ ID NO: 1865 - DNA, 23 bp, Homo sapiens
  source 1..23: mol_type = other DNA
tctagaaaaatcagttagtttgc

SEQ ID NO: 1866 - DNA, 23 bp, Homo sapiens
  source 1..23: mol_type = other DNA
catagaaaaaccaatgagtgata

SEQ ID NO: 1867 - DNA, 23 bp, Homo sapiens
  source 1..23: mol_type = other DNA
tatatgaaaaccagtgttgcatt

SEQ ID NO: 1868 - DNA, 23 bp, Homo sapiens
  source 1..23: mol_type = other DNA
gataggaataccactgaatctat

SEQ ID NO: 1869 - DNA, 23 bp, Homo sapiens
  source 1..23: mol_type = other DNA
tataaggcaacaagttagccagg

SEQ ID NO: 1870 - DNA, 23 bp, Homo sapiens
  source 1..23: mol_type = other DNA
aagcagataaccagtgattctgg

SEQ ID NO: 1871 - DNA, 23 bp, Homo sapiens
  source 1..23: mol_type = other DNA
tataagagaatcagtgagctaga

SEQ ID NO: 1872 - DNA, 23 bp, Homo sapiens
  source 1..23: mol_type = other DNA
cataggaaaacctgtgtcatggg

SEQ ID NO: 1873 - DNA, 23 bp, Homo sapiens
  source 1..23: mol_type = other DNA
ctttgggaaaccattgaatctgg

SEQ ID NO: 1874 - DNA, 22 bp, Homo sapiens
  source 1..22: mol_type = other DNA
tgaagtaaaaccagcagtcagg

SEQ ID NO: 1875 - DNA, 22 bp, Homo sapiens
  source 1..22: mol_type = other DNA
tggaggaaaaccaggagatggg

SEQ ID NO: 1876 - DNA, 22 bp, Homo sapiens
  source 1..22: mol_type = other DNA
aagaagaaaaccaggagtcagc

SEQ ID NO: 1877 - DNA, 21 bp, Homo sapiens
  source 1..21: mol_type = other DNA
tataggaaaatcagatactgg

SEQ ID NO: 1878 - DNA, 23 bp, Homo sapiens
  source 1..23: mol_type = other DNA
cataggaagaacagtgaaaaggg

SEQ ID NO: 1879 - DNA, 23 bp, Homo sapiens
  source 1..23: mol_type = other DNA
tagggggaagccagtgagtcaag

SEQ ID NO: 1880 - DNA, 23 bp, Homo sapiens
  source 1..23: mol_type = other DNA
aatacgaaaaccagtcaggcgtg

SEQ ID NO: 1881 - DNA, 23 bp, Homo sapiens
  source 1..23: mol_type = other DNA
agtatgaaaacaaatgagttagg

SEQ ID NO: 1882 - DNA, 23 bp, Homo sapiens
  source 1..23: mol_type = other DNA
tatagaaaacccaatcagtgggt

SEQ ID NO: 1883 - DNA, 23 bp, Homo sapiens
  source 1..23: mol_type = other DNA
tataggaattgcattgaatctgc

SEQ ID NO: 1884 - DNA, 23 bp, Homo sapiens
  source 1..23: mol_type = other DNA
tatagcaaaaccaatgagataca

SEQ ID NO: 1885 - DNA, 23 bp, Homo sapiens
  source 1..23: mol_type = other DNA
tttaaaacaactaatgagtctgg

SEQ ID NO: 1886 - DNA, 23 bp, Homo sapiens
  source 1..23: mol_type = other DNA
aataagaaaacctttgagcacgg

SEQ ID NO: 1887 - DNA, 23 bp, Homo sapiens
  source 1..23: mol_type = other DNA
tataggaaattaagtgtatcctg

SEQ ID NO: 1888 - DNA, 23 bp, Homo sapiens
  source 1..23: mol_type = other DNA
aataggaataccactgaatctat

SEQ ID NO: 1889 - DNA, 23 bp, Homo sapiens
  source 1..23: mol_type = other DNA
tataggagaacccatttctcagg

SEQ ID NO: 1890 - DNA, 23 bp, Homo sapiens
  source 1..23: mol_type = other DNA
aataggaaatccagtgattttac

SEQ ID NO: 1891 - DNA, 22 bp, Homo sapiens
  source 1..22: mol_type = other DNA
tataggaaaacattgatttccg

SEQ ID NO: 1892 - DNA, 22 bp, Homo sapiens
  source 1..22: mol_type = other DNA
gataggaaaaccatgagggggt

SEQ ID NO: 1893 - DNA, 22 bp, Homo sapiens
  source 1..22: mol_type = other DNA
tataggaaaccaatgagtgctg

SEQ ID NO: 1894 - DNA, 23 bp, Homo sapiens
  source 1..23: mol_type = other DNA
tgtaagaaaaccagtgaggaggc

SEQ ID NO: 1895 - DNA, 22 bp, Homo sapiens
  source 1..22: mol_type = other DNA
tatagaaaaacagtgagttggg

SEQ ID NO: 1896 - DNA, 22 bp, Homo sapiens
  source 1..22: mol_type = other DNA
cataagaaaccagtgagcctga

SEQ ID NO: 1897 - DNA, 23 bp, Homo sapiens
  source 1..23: mol_type = other DNA
tataggaaatacagtgaatgtgg

SEQ ID NO: 1898 - DNA, 23 bp, Homo sapiens
  source 1..23: mol_type = other DNA
ttataaaaaaccagtgagactgg

SEQ ID NO: 1899 - DNA, 22 bp, Homo sapiens
  source 1..22: mol_type = other DNA
cataagaaaccagtaactctgg

SEQ ID NO: 1900 - DNA, 22 bp, Homo sapiens
  source 1..22: mol_type = other DNA
tatatggtgaccaggagtcagg

SEQ ID NO: 1901 - DNA, 23 bp, Homo sapiens
  source 1..23: mol_type = other DNA
aaacaggaaaccagtgagtctga

SEQ ID NO: 1902 - DNA, 22 bp, Homo sapiens
  source 1..22: mol_type = other DNA
tacaggaaaccagtgagaccag

SEQ ID NO: 1903 - DNA, 22 bp, Homo sapiens
  source 1..22: mol_type = other DNA
agcagcaaaaccagtgagctgg

SEQ ID NO: 1904 - DNA, 22 bp, Homo sapiens
  source 1..22: mol_type = other DNA
tataggaaaaaaatgagtcagg

SEQ ID NO: 1905 - DNA, 23 bp, Homo sapiens
  source 1..23: mol_type = other DNA
cataggagaagcagtgagcagga

SEQ ID NO: 1906 - DNA, 22 bp, Homo sapiens
  source 1..22: mol_type = other DNA
catataaaaaccatgagtcaag

SEQ ID NO: 1907 - DNA, 23 bp, Homo sapiens
  source 1..23: mol_type = other DNA
tataggtaaaccagtgtgatatg

SEQ ID NO: 1908 - DNA, 23 bp, Homo sapiens
  source 1..23: mol_type = other DNA
cataggaatctcagtgagtcagg

SEQ ID NO: 1909 - DNA, 23 bp, Homo sapiens
  source 1..23: mol_type = other DNA
tcctggaaaacaagtgagtcagg

SEQ ID NO: 1910 - DNA, 23 bp, Homo sapiens
  source 1..23: mol_type = other DNA
tttaggaaaaccagtcatccagt

SEQ ID NO: 1911 - DNA, 23 bp, Homo sapiens
  source 1..23: mol_type = other DNA
gcatggaaaaccagtaagtgtgg

SEQ ID NO: 1912 - DNA, 23 bp, Homo sapiens
  source 1..23: mol_type = other DNA
tacaggaaatccagtgagtgctg

SEQ ID NO: 1913 - DNA, 22 bp, Homo sapiens
  source 1..22: mol_type = other DNA
ggtaggaaaactaggagtcaag

SEQ ID NO: 1914 - DNA, 23 bp, Homo sapiens
  source 1..23: mol_type = other DNA
tgttggaaaacaagtgagttagg

SEQ ID NO: 1915 - DNA, 23 bp, Homo sapiens
  source 1..23: mol_type = other DNA
tttagaaaagccagtgagtgggc

SEQ ID NO: 1916 - DNA, 23 bp, Homo sapiens
  source 1..23: mol_type = other DNA
tataagaaaaccagaggtccaga

SEQ ID NO: 1917 - DNA, 23 bp, Homo sapiens
  source 1..23: mol_type = other DNA
caaaggaaaaccagtgagtttaa

SEQ ID NO: 1918 - DNA, 23 bp, Homo sapiens
  source 1..23: mol_type = other DNA
gacaataaaaccaatgagtcagg

SEQ ID NO: 1919 - DNA, 23 bp, Homo sapiens
  source 1..23: mol_type = other DNA
gagaggaaaaccagagagtcagt

SEQ ID NO: 1920 - DNA, 21 bp, Homo sapiens
  source 1..21: mol_type = other DNA
aataggaaaacatgagtctga

SEQ ID NO: 1921 - DNA, 22 bp, Homo sapiens
  source 1..22: mol_type = other DNA
tctataaaaaccgtgagtctgg

SEQ ID NO: 1922 - DNA, 23 bp, Homo sapiens
  source 1..23: mol_type = other DNA
tgaaagaaaaccagagagtttgg

SEQ ID NO: 1923 - DNA, 23 bp, Homo sapiens
  source 1..23: mol_type = other DNA
tctagaaaaaccagtgagctgac

SEQ ID NO: 1924 - DNA, 23 bp, Homo sapiens
  source 1..23: mol_type = other DNA
ttaagggaaaccagtgagctagg

SEQ ID NO: 1925 - DNA, 23 bp, Homo sapiens
  source 1..23: mol_type = other DNA
taaaataaaaccagtgagtctgc

SEQ ID NO: 1926 - DNA, 23 bp, Homo sapiens
  source 1..23: mol_type = other DNA
agtttaaaaaccagtgagtgggg

SEQ ID NO: 1927 - DNA, 22 bp, Homo sapiens
  source 1..22: mol_type = other DNA
cataggaaaacagtgagaactg

SEQ ID NO: 1928 - DNA, 22 bp, Homo sapiens
  source 1..22: mol_type = other DNA
aatagggaagcagtgggtcagg

SEQ ID NO: 1929 - DNA, 23 bp, Homo sapiens
  source 1..23: mol_type = other DNA
tttgtgaaaaccagtgatcctgg

SEQ ID NO: 1930 - DNA, 22 bp, Homo sapiens
  source 1..22: mol_type = other DNA
tacactaaaccagtgagtaggg

SEQ ID NO: 1931 - DNA, 22 bp, Homo sapiens
  source 1..22: mol_type = other DNA
tataggaacacagtgagcccag

SEQ ID NO: 1932 - DNA, 23 bp, Homo sapiens
  source 1..23: mol_type = other DNA
tataggaataccagtcagtggat

SEQ ID NO: 1933 - DNA, 23 bp, Homo sapiens
  source 1..23: mol_type = other DNA
taaaggaataccagagagtaggt

SEQ ID NO: 1934 - DNA, 23 bp, Homo sapiens
  source 1..23: mol_type = other DNA
tagaaaggaaccagtgagtcaag

SEQ ID NO: 1935 - DNA, 22 bp, Homo sapiens
  source 1..22: mol_type = other DNA
agtaggaaaaccatgagtaagc

SEQ ID NO: 1936 - DNA, 22 bp, Homo sapiens
  source 1..22: mol_type = other DNA
aatactaaaaccatgagccagg

SEQ ID NO: 1937 - DNA, 23 bp, Homo sapiens
  source 1..23: mol_type = other DNA
tgtatgtaaaccagtgattacag

SEQ ID NO: 1938 - DNA, 23 bp, Homo sapiens
  source 1..23: mol_type = other DNA
actaggaaaatcagttagtgggg

SEQ ID NO: 1939 - DNA, 23 bp, Homo sapiens
  source 1..23: mol_type = other DNA
tataagaaaaccagttccttggg

SEQ ID NO: 1940 - DNA, 22 bp, Homo sapiens
  source 1..22: mol_type = other DNA
actagtaaaaccagtgatctgt

SEQ ID NO: 1941 - DNA, 23 bp, Homo sapiens
  source 1..23: mol_type = other DNA
ttctggaaaaccagtgaatactg

SEQ ID NO: 1942 - DNA, 23 bp, Homo sapiens
  source 1..23: mol_type = other DNA
tatagggaagccagtaagctgag

SEQ ID NO: 1943 - DNA, 24 bp, Homo sapiens
  source 1..24: mol_type = other DNA
tggaggcaaaaccagtgagttggt

SEQ ID NO: 1944 - DNA, 23 bp, Homo sapiens
  source 1..23: mol_type = other DNA
tacaggaaagccagtgagacagg

SEQ ID NO: 1945 - DNA, 23 bp, Homo sapiens
  source 1..23: mol_type = other DNA
tcatggtaaaccagtgagatagg

SEQ ID NO: 1946 - DNA, 22 bp, Homo sapiens
  source 1..22: mol_type = other DNA
gctaggataaccatgagtatgg

SEQ ID NO: 1947 - DNA, 23 bp, Homo sapiens
  source 1..23: mol_type = other DNA
gataggaaagccagtgagtttag

SEQ ID NO: 1948 - DNA, 25 bp, Homo sapiens
  source 1..25: mol_type = other DNA
tgtagtaaagaaccagtgattaggg

SEQ ID NO: 1949 - DNA, 23 bp, Homo sapiens
  source 1..23: mol_type = other DNA
taaaggaaaaccagtgtttctga

SEQ ID NO: 1950 - DNA, 23 bp, Homo sapiens
  source 1..23: mol_type = other DNA
gcctggaaaaccaatgaggctgg

SEQ ID NO: 1951 - DNA, 23 bp, Homo sapiens
  source 1..23: mol_type = other DNA
tgtaagaaaaaccatgactcagg

SEQ ID NO: 1952 - DNA, 22 bp, Homo sapiens
  source 1..22: mol_type = other DNA
cataggaaggccatgagttggg

SEQ ID NO: 1953 - DNA, 22 bp, Homo sapiens
  source 1..22: mol_type = other DNA
taaaggaaaccagtgggctggg

SEQ ID NO: 1954 - DNA, 23 bp, Homo sapiens
  source 1..23: mol_type = other DNA
aataggtaaaccactgatccaga

SEQ ID NO: 1955 - DNA, 23 bp, Homo sapiens
  source 1..23: mol_type = other DNA
cattaggaaaccagtgattctgt

SEQ ID NO: 1956 - DNA, 21 bp, Homo sapiens
  source 1..21: mol_type = other DNA
tatagtaaaatctgagtctga

SEQ ID NO: 1957 - DNA, 22 bp, Homo sapiens
  source 1..22: mol_type = other DNA
ttaaggttaaccagtgatctgg

SEQ ID NO: 1958 - DNA, 23 bp, Homo sapiens
  source 1..23: mol_type = other DNA
tggggggaaaccagtgagccagg

SEQ ID NO: 1959 - DNA, 22 bp, Homo sapiens
  source 1..22: mol_type = other DNA
gatttgaaaccagtgagtctgg

SEQ ID NO: 1960 - DNA, 22 bp, Homo sapiens
  source 1..22: mol_type = other DNA
tctaaggaagccagtagtcagg

SEQ ID NO: 1961 - DNA, 23 bp, Homo sapiens
  source 1..23: mol_type = other DNA
atgaggaaaagcagtgagttgag

SEQ ID NO: 1962 - DNA, 23 bp, Homo sapiens
  source 1..23: mol_type = other DNA
attaggaaaactagagagactgg

SEQ ID NO: 1963 - DNA, 22 bp, Homo sapiens
  source 1..22: mol_type = other DNA
tatagaaaaccagtgtattctg

SEQ ID NO: 1964 - DNA, 23 bp, Homo sapiens
  source 1..23: mol_type = other DNA
taggagaaaaccggtgaatcagg

SEQ ID NO: 1965 - DNA, 23 bp, Homo sapiens
  source 1..23: mol_type = other DNA
tacaagccaaccagtgagtccag

SEQ ID NO: 1966 - DNA, 23 bp, Homo sapiens
  source 1..23: mol_type = other DNA
actagaaaaaccagtaagtcagt

SEQ ID NO: 1967 - DNA, 23 bp, Homo sapiens
  source 1..23: mol_type = other DNA
taatagcaaagcagtgagttagg

SEQ ID NO: 1968 - DNA, 22 bp, Homo sapiens
  source 1..22: mol_type = other DNA
tataggaaaccagtgagtacca

SEQ ID NO: 1969 - DNA, 21 bp, Homo sapiens
  source 1..21: mol_type = other DNA
cataggtaaacgtgagtcatg

SEQ ID NO: 1970 - DNA, 22 bp, Homo sapiens
  source 1..22: mol_type = other DNA
gatagtaaaacagtgatgcagg

SEQ ID NO: 1971 - DNA, 23 bp, Homo sapiens
  source 1..23: mol_type = other DNA
aataggaaaatctgtggagcagg

SEQ ID NO: 1972 - DNA, 23 bp, Homo sapiens
  source 1..23: mol_type = other DNA
tataggtaaaccagctagtagtt

SEQ ID NO: 1973 - DNA, 23 bp, Homo sapiens
  source 1..23: mol_type = other DNA
tataggaaaaccaatcaatccag

SEQ ID NO: 1974 - DNA, 22 bp, Homo sapiens
  source 1..22: mol_type = other DNA
cataggtaaaccatggctcagg

SEQ ID NO: 1975 - DNA, 23 bp, Homo sapiens
  source 1..23: mol_type = other DNA
tgaaggaaagccagtgagcctgg

SEQ ID NO: 1976 - DNA, 23 bp, Homo sapiens
  source 1..23: mol_type = other DNA
caaaggaaaaccagagaggccgg

SEQ ID NO: 1977 - DNA, 22 bp, Homo sapiens
  source 1..22: mol_type = other DNA
aatgggaaagccatgagtcagg

SEQ ID NO: 1978 - DNA, 23 bp, Homo sapiens
  source 1..23: mol_type = other DNA
tagaggcaaaccagtaagtcaga

SEQ ID NO: 1979 - DNA, 23 bp, Homo sapiens
  source 1..23: mol_type = other DNA
gggagacaaaccagtgagccagg

SEQ ID NO: 1980 - DNA, 22 bp, Homo sapiens
  source 1..22: mol_type = other DNA
tgtgagtaaccagtgagtctgg

SEQ ID NO: 1981 - DNA, 21 bp, Homo sapiens
  source 1..21: mol_type = other DNA
tgcaggaaccagtgagtcatg

SEQ ID NO: 1982 - DNA, 23 bp, Homo sapiens
  source 1..23: mol_type = other DNA
tcacgtaaaaccagtgagtggtg

SEQ ID NO: 1983 - DNA, 22 bp, Homo sapiens
  source 1..22: mol_type = other DNA
gataacaaaaccagtagttggg

SEQ ID NO: 1984 - DNA, 22 bp, Homo sapiens
  source 1..22: mol_type = other DNA
ggtatgaaacccaggagtctgg

SEQ ID NO: 1985 - DNA, 23 bp, Homo sapiens
  source 1..23: mol_type = other DNA
tgaaggaaagccagtgaggtggg

SEQ ID NO: 1986 - DNA, 22 bp, Homo sapiens
  source 1..22: mol_type = other DNA
tttaggagcacagtgagttggg

SEQ ID NO: 1987 - DNA, 22 bp, Homo sapiens
  source 1..22: mol_type = other DNA
cagaagaaaaccattggtctgg

SEQ ID NO: 1988 - DNA, 23 bp, Homo sapiens
  source 1..23: mol_type = other DNA
tataagataaacagtaaatcagg

SEQ ID NO: 1989 - DNA, 23 bp, Homo sapiens
  source 1..23: mol_type = other DNA
tagaggaaaaccaaggactctgg

SEQ ID NO: 1990 - DNA, 23 bp, Homo sapiens
  source 1..23: mol_type = other DNA
tggagttaaaccagtgagccgag

SEQ ID NO: 1991 - DNA, 22 bp, Homo sapiens
  source 1..22: mol_type = other DNA
tgtaggatatctagtgatcagg

SEQ ID NO: 1992 - DNA, 23 bp, Homo sapiens
  source 1..23: mol_type = other DNA
tatacatacaccaatgagtaagg

SEQ ID NO: 1993 - DNA, 23 bp, Homo sapiens
  source 1..23: mol_type = other DNA
tcttgaataaccagtgagtcaaa

SEQ ID NO: 1994 - DNA, 23 bp, Homo sapiens
  source 1..23: mol_type = other DNA
tgaaggaaacccattgaggctga

SEQ ID NO: 1995 - DNA, 24 bp, Homo sapiens
  source 1..24: mol_type = other DNA
tccaggaaaacccagtgagacagg

SEQ ID NO: 1996 - DNA, 22 bp, Homo sapiens
  source 1..22: mol_type = other DNA
tgtaggaagagcaggagtttgg

SEQ ID NO: 1997 - DNA, 22 bp, Homo sapiens
  source 1..22: mol_type = other DNA
tataggaaaaaggtgagtctta

SEQ ID NO: 1998 - DNA, 22 bp, Homo sapiens
  source 1..22: mol_type = other DNA
tataggaaagcaaggagtaggt

SEQ ID NO: 1999 - DNA, 22 bp, Homo sapiens
  source 1..22: mol_type = other DNA
cagaggaagaacagtgagctgg

SEQ ID NO: 2000 - DNA, 23 bp, Homo sapiens
  source 1..23: mol_type = other DNA
tatctggcagccagtcagtctgg

SEQ ID NO: 2001 - DNA, 23 bp, Homo sapiens
  source 1..23: mol_type = other DNA
taaaagtaaaccagtgagtgaag

SEQ ID NO: 2002 - DNA, 23 bp, Homo sapiens
  source 1..23: mol_type = other DNA
tagctgaatacctgtgattcagg

SEQ ID NO: 2003 - DNA, 23 bp, Homo sapiens
  source 1..23: mol_type = other DNA
tataggaatacctgagactgggt

SEQ ID NO: 2004 - DNA, 23 bp, Homo sapiens
  source 1..23: mol_type = other DNA
attaagaaatccagtgaggccgg

SEQ ID NO: 2005 - DNA, 23 bp, Homo sapiens
  source 1..23: mol_type = other DNA
tataggaaacccagaatgtcaag

SEQ ID NO: 2006 - DNA, 23 bp, Homo sapiens
  source 1..23: mol_type = other DNA
attagggaaagcagggattctgg

SEQ ID NO: 2007 - DNA, 23 bp, Homo sapiens
  source 1..23: mol_type = other DNA
taataaaaaatcagtgagtcatg

SEQ ID NO: 2008 - DNA, 22 bp, Homo sapiens
  source 1..22: mol_type = other DNA
gatagaaaacctgtgagcctgg

SEQ ID NO: 2009 - DNA, 21 bp, Homo sapiens
  source 1..21: mol_type = other DNA
tttatgatccagtgagtctgg

SEQ ID NO: 2010 - DNA, 23 bp, Homo sapiens
  source 1..23: mol_type = other DNA
tataagaacaccagtgattggat

SEQ ID NO: 2011 - DNA, 23 bp, Homo sapiens
  source 1..23: mol_type = other DNA
aatatgaaaacaaatgagcttgg

SEQ ID NO: 2012 - DNA, 23 bp, Homo sapiens
  source 1..23: mol_type = other DNA
tctaggaaaaccagtgtcaaaga

SEQ ID NO: 2013 - DNA, 23 bp, Homo sapiens
  source 1..23: mol_type = other DNA
tataagaatgccagtgaggtctg

SEQ ID NO: 2014 - DNA, 23 bp, Homo sapiens
  source 1..23: mol_type = other DNA
catatgtaaactaatgagtctgg

SEQ ID NO: 2015 - DNA, 23 bp, Homo sapiens
  source 1..23: mol_type = other DNA
ttaatgaaaaccagtggtttggg

SEQ ID NO: 2016 - DNA, 22 bp, Homo sapiens
  source 1..22: mol_type = other DNA
tgtaggaaagccattgctcagg

SEQ ID NO: 2017 - DNA, 21 bp, Homo sapiens
  source 1..21: mol_type = other DNA
tggaggaaacagtgagtgtgg

SEQ ID NO: 2018 - DNA, 21 bp, Homo sapiens
  source 1..21: mol_type = other DNA
tttaggaaaatcagactctgg

SEQ ID NO: 2019 - DNA, 23 bp, Homo sapiens
  source 1..23: mol_type = other DNA
tataggaaatccagagtgtgtgg

SEQ ID NO: 2020 - DNA, 23 bp, Homo sapiens
  source 1..23: mol_type = other DNA
tataaggacaccagtgatattgg

SEQ ID NO: 2021 - DNA, 23 bp, Homo sapiens
  source 1..23: mol_type = other DNA
tataggaacaaaagttattttgg

SEQ ID NO: 2022 - DNA, 23 bp, Homo sapiens
  source 1..23: mol_type = other DNA
gaaaggaaaactagtgaacgagg

SEQ ID NO: 2023 - DNA, 23 bp, Homo sapiens
  source 1..23: mol_type = other DNA
taaagaaaaaacaatgagcaagg

SEQ ID NO: 2024 - DNA, 23 bp, Homo sapiens
  source 1..23: mol_type = other DNA
tataggaagcccagtgtattatg

SEQ ID NO: 2025 - DNA, 23 bp, Homo sapiens
  source 1..23: mol_type = other DNA
tatatgaaaacgtgtgactctgt

SEQ ID NO: 2026 - DNA, 22 bp, Homo sapiens
  source 1..22: mol_type = other DNA
cataggaaaacagagagacaga

SEQ ID NO: 2027 - DNA, 22 bp, Homo sapiens
  source 1..22: mol_type = other DNA
tgtaggctaacagtgaatcagg

SEQ ID NO: 2028 - DNA, 22 bp, Homo sapiens
  source 1..22: mol_type = other DNA
tatagggaaacagtgattccaa

SEQ ID NO: 2029 - DNA, 21 bp, Homo sapiens
  source 1..21: mol_type = other DNA
catagaacccagtgagtcagc

SEQ ID NO: 2030 - DNA, 21 bp, Homo sapiens
  source 1..21: mol_type = other DNA
taaaggaatacctgaggcggg

SEQ ID NO: 2031 - DNA, 22 bp, Homo sapiens
  source 1..22: mol_type = other DNA
tttataaaaccagagagtttgg

SEQ ID NO: 2032 - DNA, 22 bp, Homo sapiens
  source 1..22: mol_type = other DNA
tataggataccagtgaaagagg

SEQ ID NO: 2033 - DNA, 22 bp, Homo sapiens
  source 1..22: mol_type = other DNA
tacagcaaaaccatgagccagg

SEQ ID NO: 2034 - DNA, 22 bp, Homo sapiens
  source 1..22: mol_type = other DNA
tgtagcaaaaccatgggtctgc

SEQ ID NO: 2035 - DNA, 22 bp, Homo sapiens
  source 1..22: mol_type = other DNA
tataggtaaaacagtatgctgg

SEQ ID NO: 2036 - DNA, 22 bp, Homo sapiens
  source 1..22: mol_type = other DNA
gaaaggaaaaccagtggtaggc

SEQ ID NO: 2037 - DNA, 23 bp, Homo sapiens
  source 1..23: mol_type = other DNA
tagaaaaaaatcagtgagtgagg

SEQ ID NO: 2038 - DNA, 23 bp, Homo sapiens
  source 1..23: mol_type = other DNA
tttaggaaaaccagcaggacagg

SEQ ID NO: 2039 - DNA, 23 bp, Homo sapiens
  source 1..23: mol_type = other DNA
tggaggaaaactagtgtttctgc

SEQ ID NO: 2040 - DNA, 23 bp, Homo sapiens
  source 1..23: mol_type = other DNA
aataggagagccagtgaatgcag

SEQ ID NO: 2041 - DNA, 23 bp, Homo sapiens
  source 1..23: mol_type = other DNA
aacaggaaaccttgtaagtctgg

SEQ ID NO: 2042 - DNA, 23 bp, Homo sapiens
  source 1..23: mol_type = other DNA
gacaacaaaaccactgggtctgg

SEQ ID NO: 2043 - DNA, 24 bp, Homo sapiens
  source 1..24: mol_type = other DNA
tatacaaaaaccaatgatgtcagg

SEQ ID NO: 2044 - DNA, 21 bp, Homo sapiens
  source 1..21: mol_type = other DNA
tttagaaaccagtgtgtccgg

SEQ ID NO: 2045 - DNA, 22 bp, Homo sapiens
  source 1..22: mol_type = other DNA
tatggaaaaccggtgtgtgggt

SEQ ID NO: 2046 - DNA, 22 bp, Homo sapiens
  source 1..22: mol_type = other DNA
tagaggaaaccagtgagattga

SEQ ID NO: 2047 - DNA, 22 bp, Homo sapiens
  source 1..22: mol_type = other DNA
gataggaaaacaaagagtcaga

SEQ ID NO: 2048 - DNA, 22 bp, Homo sapiens
  source 1..22: mol_type = other DNA
tatagggaacccaggagtgagg

SEQ ID NO: 2049 - DNA, 23 bp, Homo sapiens
  source 1..23: mol_type = other DNA
tctagaaaagagagtgagtctgt

SEQ ID NO: 2050 - DNA, 23 bp, Homo sapiens
  source 1..23: mol_type = other DNA
tatagggaaaccagtaaggtaca

SEQ ID NO: 2051 - DNA, 23 bp, Homo sapiens
  source 1..23: mol_type = other DNA
tataggaacacatgtgggtaagg

SEQ ID NO: 2052 - DNA, 23 bp, Homo sapiens
  source 1..23: mol_type = other DNA
tataggatctgcagtaactccgg

SEQ ID NO: 2053 - DNA, 23 bp, Homo sapiens
  source 1..23: mol_type = other DNA
tattggcaaaacggtgagtctat

SEQ ID NO: 2054 - DNA, 23 bp, Homo sapiens
  source 1..23: mol_type = other DNA
tgtaagaaaaccagtcatgcctg

SEQ ID NO: 2055 - DNA, 23 bp, Homo sapiens
  source 1..23: mol_type = other DNA
tagaagtaaaccagtgggttttg

SEQ ID NO: 2056 - DNA, 23 bp, Homo sapiens
  source 1..23: mol_type = other DNA
tcaaggaaaaacagtgagctgag

SEQ ID NO: 2057 - DNA, 23 bp, Homo sapiens
  source 1..23: mol_type = other DNA
taatagaagaccagtgtgtgtgg

SEQ ID NO: 2058 - DNA, 23 bp, Homo sapiens
  source 1..23: mol_type = other DNA
cacaagaaaagcagctagtctgg

SEQ ID NO: 2059 - DNA, 23 bp, Homo sapiens
  source 1..23: mol_type = other DNA
tagaggaaaactagtgaaatctg

SEQ ID NO: 2060 - DNA, 23 bp, Homo sapiens
  source 1..23: mol_type = other DNA
tataagaatagcattgaatctgt

SEQ ID NO: 2061 - DNA, 22 bp, Homo sapiens
  source 1..22: mol_type = other DNA
tgtaggaaaacagtgtttctga

SEQ ID NO: 2062 - DNA, 22 bp, Homo sapiens
  source 1..22: mol_type = other DNA
tatatgaaaaccagcaatgtgg

SEQ ID NO: 2063 - DNA, 23 bp, Homo sapiens
  source 1..23: mol_type = other DNA
cataggaaaaccagtgagttggg

SEQ ID NO: 2064 - DNA, 22 bp, Homo sapiens
  source 1..22: mol_type = other DNA
tataggacaccagtgaggctgg

SEQ ID NO: 2065 - DNA, 23 bp, Homo sapiens
  source 1..23: mol_type = other DNA
aataggaaaaccagtgtgcagga

SEQ ID NO: 2066 - DNA, 23 bp, Homo sapiens
  source 1..23: mol_type = other DNA
ttgaggaaaaccagtaagtgagt

SEQ ID NO: 2067 - DNA, 23 bp, Homo sapiens
  source 1..23: mol_type = other DNA
tataggaataccagtgatttttg

SEQ ID NO: 2068 - DNA, 22 bp, Homo sapiens
  source 1..22: mol_type = other DNA
tatataaaaccagtgagtgggt

SEQ ID NO: 2069 - DNA, 22 bp, Homo sapiens
  source 1..22: mol_type = other DNA
tgtaggggaccagtgagtcggg

SEQ ID NO: 2070 - DNA, 23 bp, Homo sapiens
  source 1..23: mol_type = other DNA
attgggaaaaccagtgagatggc

SEQ ID NO: 2071 - DNA, 23 bp, Homo sapiens
  source 1..23: mol_type = other DNA
gaatggaaaaccagtgaggctgg

SEQ ID NO: 2072 - DNA, 22 bp, Homo sapiens
  source 1..22: mol_type = other DNA
cataggatatcagtgagtctga

SEQ ID NO: 2073 - DNA, 23 bp, Homo sapiens
  source 1..23: mol_type = other DNA
tagtagaatacaagtgagtctgg

SEQ ID NO: 2074 - DNA, 22 bp, Homo sapiens
  source 1..22: mol_type = other DNA
agtaggaaaacaagtaatctgg

SEQ ID NO: 2075 - DNA, 23 bp, Homo sapiens
  source 1..23: mol_type = other DNA
aataggaaaacaagtgagcatgg

SEQ ID NO: 2076 - DNA, 23 bp, Homo sapiens
  source 1..23: mol_type = other DNA
aatagtgaaaccagggagtcgag

SEQ ID NO: 2077 - DNA, 23 bp, Homo sapiens
  source 1..23: mol_type = other DNA
aataggtaaacaagtgagtgtgg

SEQ ID NO: 2078 - DNA, 23 bp, Homo sapiens
  source 1..23: mol_type = other DNA
aagaggaaaaccagtgagaggat

SEQ ID NO: 2079 - DNA, 22 bp, Homo sapiens
  source 1..22: mol_type = other DNA
aataggaaaaacaggagtgggg

SEQ ID NO: 2080 - DNA, 22 bp, Homo sapiens
  source 1..22: mol_type = other DNA
tataaggaaactatgagtcagg

SEQ ID NO: 2081 - DNA, 23 bp, Homo sapiens
  source 1..23: mol_type = other DNA
aataggaaatcaggtgagtcaag

SEQ ID NO: 2082 - DNA, 23 bp, Homo sapiens
  source 1..23: mol_type = other DNA
tttggtaaaaccagtgagcaggt

SEQ ID NO: 2083 - DNA, 22 bp, Homo sapiens
  source 1..22: mol_type = other DNA
attaggaagcccagtgatctgg

SEQ ID NO: 2084 - DNA, 23 bp, Homo sapiens
  source 1..23: mol_type = other DNA
tctaggaaaaacagtgtgtagga

SEQ ID NO: 2085 - DNA, 22 bp, Homo sapiens
  source 1..22: mol_type = other DNA
tataggaaaacagagatccagg

SEQ ID NO: 2086 - DNA, 22 bp, Homo sapiens
  source 1..22: mol_type = other DNA
tatagggagccagtgagttaga

SEQ ID NO: 2087 - DNA, 23 bp, Homo sapiens
  source 1..23: mol_type = other DNA
tataggaaaatctgtgtgtctgg

SEQ ID NO: 2088 - DNA, 21 bp, Homo sapiens
  source 1..21: mol_type = other DNA
cctaggaaccagtgagtccag

SEQ ID NO: 2089 - DNA, 23 bp, Homo sapiens
  source 1..23: mol_type = other DNA
aaacagaaaaccactgagtcaag

SEQ ID NO: 2090 - DNA, 23 bp, Homo sapiens
  source 1..23: mol_type = other DNA
tgtagcaaaaccagtaaattgga

SEQ ID NO: 2091 - DNA, 23 bp, Homo sapiens
  source 1..23: mol_type = other DNA
tttaaggaaaccaatgagacagg

SEQ ID NO: 2092 - DNA, 22 bp, Homo sapiens
  source 1..22: mol_type = other DNA
aacaggaaaaccctgagtctgg

SEQ ID NO: 2093 - DNA, 23 bp, Homo sapiens
  source 1..23: mol_type = other DNA
tatagaaataccaatgagttatg

SEQ ID NO: 2094 - DNA, 21 bp, Homo sapiens
  source 1..21: mol_type = other DNA
tatagttaccagtgagtttgg

SEQ ID NO: 2095 - DNA, 23 bp, Homo sapiens
  source 1..23: mol_type = other DNA
tatatgaaaaacagtgaattggt

SEQ ID NO: 2096 - DNA, 23 bp, Homo sapiens
  source 1..23: mol_type = other DNA
tgtaggaagaccagtggcttggc

SEQ ID NO: 2097 - DNA, 22 bp, Homo sapiens
  source 1..22: mol_type = other DNA
aataggaatcccaggagtcaag

SEQ ID NO: 2098 - DNA, 22 bp, Homo sapiens
  source 1..22: mol_type = other DNA
cagaggaaaaccatgagtcagc

SEQ ID NO: 2099 - DNA, 23 bp, Homo sapiens
  source 1..23: mol_type = other DNA
tatagggaaaccagtaatattgg

SEQ ID NO: 2100 - DNA, 23 bp, Homo sapiens
  source 1..23: mol_type = other DNA
tatagaaaaaccagcaagacagg

SEQ ID NO: 2101 - DNA, 23 bp, Homo sapiens
  source 1..23: mol_type = other DNA
atttgtaaaaccagagagttggg

SEQ ID NO: 2102 - DNA, 22 bp, Homo sapiens
  source 1..22: mol_type = other DNA
gttaggaaaacagagactctgg

SEQ ID NO: 2103 - DNA, 23 bp, Homo sapiens
  source 1..23: mol_type = other DNA
tatatgaaaaccattgaatggga

SEQ ID NO: 2104 - DNA, 23 bp, Homo sapiens
  source 1..23: mol_type = other DNA
gatagacaagccagtgagtaggt

SEQ ID NO: 2105 - DNA, 23 bp, Homo sapiens
  source 1..23: mol_type = other DNA
tataagaacaccagtaatactgg

SEQ ID NO: 2106 - DNA, 22 bp, Homo sapiens
  source 1..22: mol_type = other DNA
aatagcaaaaccaggaggcagg

SEQ ID NO: 2107 - DNA, 23 bp, Homo sapiens
  source 1..23: mol_type = other DNA
gataggaaaactaatgagtagaa

SEQ ID NO: 2108 - DNA, 22 bp, Homo sapiens
  source 1..22: mol_type = other DNA
tgtatgaaaaccatgaatccag

SEQ ID NO: 2109 - DNA, 22 bp, Homo sapiens
  source 1..22: mol_type = other DNA
tgtagaaaaaccagtcctcagg

SEQ ID NO: 2110 - DNA, 22 bp, Homo sapiens
  source 1..22: mol_type = other DNA
aataataaaaccagagatctgg

SEQ ID NO: 2111 - DNA, 23 bp, Homo sapiens
  source 1..23: mol_type = other DNA
tttaggaaaactagtaagatggg

SEQ ID NO: 2112 - DNA, 23 bp, Homo sapiens
  source 1..23: mol_type = other DNA
tttaaggaatacagtgagtcagg

SEQ ID NO: 2113 - DNA, 21 bp, Homo sapiens
  source 1..21: mol_type = other DNA
ggtaggagaacctgagtctgg

SEQ ID NO: 2114 - DNA, 21 bp, Homo sapiens
  source 1..21: mol_type = other DNA
aataggaagcagtaagtcagg

SEQ ID NO: 2115 - DNA, 23 bp, Homo sapiens
  source 1..23: mol_type = other DNA
agtttgagaaccagtgagtcagg

SEQ ID NO: 2116 - DNA, 23 bp, Homo sapiens
  source 1..23: mol_type = other DNA
gaaaggaaaaacagtgatttggc

SEQ ID NO: 2117 - DNA, 23 bp, Homo sapiens
  source 1..23: mol_type = other DNA
aataaagaaaccagtgagagagg

SEQ ID NO: 2118 - DNA, 23 bp, Homo sapiens
  source 1..23: mol_type = other DNA
catatgaaaaccagtgagtttta

SEQ ID NO: 2119 - DNA, 22 bp, Homo sapiens
  source 1..22: mol_type = other DNA
tataggagaaccatgatttgga

SEQ ID NO: 2120 - DNA, 23 bp, Homo sapiens
  source 1..23: mol_type = other DNA
tatataaaacacagtgagtaggc

SEQ ID NO: 2121 - DNA, 22 bp, Homo sapiens
  source 1..22: mol_type = other DNA
tatagaaaaacagagagtctgc

SEQ ID NO: 2122 - DNA, 23 bp, Homo sapiens
  source 1..23: mol_type = other DNA
aatattataaccaatgagtcagg

SEQ ID NO: 2123 - DNA, 22 bp, Homo sapiens
  source 1..22: mol_type = other DNA
tataagaaaccagtgctgcagg

SEQ ID NO: 2124 - DNA, 22 bp, Homo sapiens
  source 1..22: mol_type = other DNA
catagttaaacagagagtcagg

SEQ ID NO: 2125 - DNA, 23 bp, Homo sapiens
  source 1..23: mol_type = other DNA
tataagaaaacccataagtcagg

SEQ ID NO: 2126 - DNA, 23 bp, Homo sapiens
  source 1..23: mol_type = other DNA
tataaaggaaccaatgagtctgc

SEQ ID NO: 2127 - DNA, 23 bp, Homo sapiens
  source 1..23: mol_type = other DNA
taccagtgaaccagtgagtctgg

SEQ ID NO: 2128 - DNA, 23 bp, Homo sapiens
  source 1..23: mol_type = other DNA
tgcactaaaaccactgagtccag

SEQ ID NO: 2129 - DNA, 23 bp, Homo sapiens
  source 1..23: mol_type = other DNA
tggggaaataccagtgagtccag

SEQ ID NO: 2130 - DNA, 23 bp, Homo sapiens
  source 1..23: mol_type = other DNA
atgaagaaaaccagtgagacatg

SEQ ID NO: 2131 - DNA, 21 bp, Homo sapiens
  source 1..21: mol_type = other DNA
taaaggaaccaatgagtctgc

SEQ ID NO: 2132 - DNA, 23 bp, Homo sapiens
  source 1..23: mol_type = other DNA
tatagggataccagtaagtggac

SEQ ID NO: 2133 - DNA, 22 bp, Homo sapiens
  source 1..22: mol_type = other DNA
cataaaagaaccaggagtcagg

SEQ ID NO: 2134 - DNA, 23 bp, Homo sapiens
  source 1..23: mol_type = other DNA
tataggaaatccaggggttgggt

SEQ ID NO: 2135 - DNA, 21 bp, Homo sapiens
  source 1..21: mol_type = other DNA
tttataaaccagtgagtctgt

SEQ ID NO: 2136 - DNA, 22 bp, Homo sapiens
  source 1..22: mol_type = other DNA
tatagcaaaaccagtactcaga

SEQ ID NO: 2137 - DNA, 23 bp, Homo sapiens
  source 1..23: mol_type = other DNA
tataggagagccagtgagcaaag

SEQ ID NO: 2138 - DNA, 23 bp, Homo sapiens
  source 1..23: mol_type = other DNA
tgtaggaataccagttagtggtc

SEQ ID NO: 2139 - DNA, 22 bp, Homo sapiens
  source 1..22: mol_type = other DNA
tataagacacaagtgggtccgg

SEQ ID NO: 2140 - DNA, 22 bp, Homo sapiens
  source 1..22: mol_type = other DNA
tatagggaaacctgagatatgg

SEQ ID NO: 2141 - DNA, 22 bp, Homo sapiens
  source 1..22: mol_type = other DNA
tataggaaaaaaaagagtctgg

SEQ ID NO: 2142 - DNA, 23 bp, Homo sapiens
  source 1..23: mol_type = other DNA
aaatacaaaaccggtgagtctgg

SEQ ID NO: 2143 - DNA, 22 bp, Homo sapiens
  source 1..22: mol_type = other DNA
taaaggaagccagtgagtgagc

SEQ ID NO: 2144 - DNA, 23 bp, Homo sapiens
  source 1..23: mol_type = other DNA
tcctgaacaaccaatgagtcagg

SEQ ID NO: 2145 - DNA, 23 bp, Homo sapiens
  source 1..23: mol_type = other DNA
tataggaaggccagtgggcctgg

SEQ ID NO: 2146 - DNA, 23 bp, Homo sapiens
  source 1..23: mol_type = other DNA
aggaggaaaaccagagagtgtga

SEQ ID NO: 2147 - DNA, 24 bp, Homo sapiens
  source 1..24: mol_type = other DNA
cagaggaaaaccaggagagtgtgg

SEQ ID NO: 2148 - DNA, 23 bp, Homo sapiens
  source 1..23: mol_type = other DNA
aaaaaggaaaccagtgagcttgg

SEQ ID NO: 2149 - DNA, 23 bp, Homo sapiens
  source 1..23: mol_type = other DNA
catactattaccagtgagtttgg

SEQ ID NO: 2150 - DNA, 23 bp, Homo sapiens
  source 1..23: mol_type = other DNA
aataaaaaaagcagtgagtgggg

SEQ ID NO: 2151 - DNA, 21 bp, Homo sapiens
  source 1..21: mol_type = other DNA
tgtaggagacagtgagtctga

SEQ ID NO: 2152 - DNA, 22 bp, Homo sapiens
  source 1..22: mol_type = other DNA
tatagacagacaagtgagcagg

SEQ ID NO: 2153 - DNA, 22 bp, Homo sapiens
  source 1..22: mol_type = other DNA
gaaagcaaagccagtggtcagg

SEQ ID NO: 2154 - DNA, 23 bp, Homo sapiens
  source 1..23: mol_type = other DNA
tgtaggacaaccagtggttccag

SEQ ID NO: 2155 - DNA, 23 bp, Homo sapiens
  source 1..23: mol_type = other DNA
tataggaaagctagtgaattttg

SEQ ID NO: 2156 - DNA, 23 bp, Homo sapiens
  source 1..23: mol_type = other DNA
gatgggaaacccactgagtgagg

SEQ ID NO: 2157 - DNA, 24 bp, Homo sapiens
  source 1..24: mol_type = other DNA
tataggaatcaccagtaaatcagg

SEQ ID NO: 2158 - DNA, 22 bp, Homo sapiens
  source 1..22: mol_type = other DNA
tttaggaagacagtgagttagg

SEQ ID NO: 2159 - DNA, 23 bp, Homo sapiens
  source 1..23: mol_type = other DNA
aaaaggaaatccagtgagacaag

SEQ ID NO: 2160 - DNA, 23 bp, Homo sapiens
  source 1..23: mol_type = other DNA
aatatgtaaacgagtgagcatgg

SEQ ID NO: 2161 - DNA, 23 bp, Homo sapiens
  source 1..23: mol_type = other DNA
taaacgtaaactagtgagtctcc

SEQ ID NO: 2162 - DNA, 23 bp, Homo sapiens
  source 1..23: mol_type = other DNA
aataggaaagccagagaattagc

SEQ ID NO: 2163 - DNA, 23 bp, Homo sapiens
  source 1..23: mol_type = other DNA
tatatgaaaaccattggtccagc

SEQ ID NO: 2164 - DNA, 23 bp, Homo sapiens
  source 1..23: mol_type = other DNA
tataggacacctagtaagtaagg

SEQ ID NO: 2165 - DNA, 23 bp, Homo sapiens
  source 1..23: mol_type = other DNA
tattggtaaaccagagagtctca

SEQ ID NO: 2166 - DNA, 22 bp, Homo sapiens
  source 1..22: mol_type = other DNA
tataggaaacaggtgagacatg

SEQ ID NO: 2167 - DNA, 22 bp, Homo sapiens
  source 1..22: mol_type = other DNA
ggtaggaaaacagtaagtgtgg

SEQ ID NO: 2168 - DNA, 22 bp, Homo sapiens
  source 1..22: mol_type = other DNA
tataacaaaaccatgaatgggg

SEQ ID NO: 2169 - DNA, 21 bp, Homo sapiens
  source 1..21: mol_type = other DNA
tatgtgtaaacctgagtcagg

SEQ ID NO: 2170 - DNA, 23 bp, Homo sapiens
  source 1..23: mol_type = other DNA
tataggaaaagcagtgtgtttaa

SEQ ID NO: 2171 - DNA, 23 bp, Homo sapiens
  source 1..23: mol_type = other DNA
aatgagaaaaccagagaggctag

SEQ ID NO: 2172 - DNA, 23 bp, Homo sapiens
  source 1..23: mol_type = other DNA
agtaggaagaccagtgaggaagc

SEQ ID NO: 2173 - DNA, 23 bp, Homo sapiens
  source 1..23: mol_type = other DNA
tataaataaaccagtgaaaaggg

SEQ ID NO: 2174 - DNA, 22 bp, Homo sapiens
  source 1..22: mol_type = other DNA
taagggaaagcagagaggctgg

SEQ ID NO: 2175 - DNA, 23 bp, Homo sapiens
  source 1..23: mol_type = other DNA
tgtaggaaaccaacagagtctga

SEQ ID NO: 2176 - DNA, 23 bp, Homo sapiens
  source 1..23: mol_type = other DNA
tttaggaaaaacagtggtcctag

SEQ ID NO: 2177 - DNA, 23 bp, Homo sapiens
  source 1..23: mol_type = other DNA
tctagtataacaagtgagttggc

SEQ ID NO: 2178 - DNA, 23 bp, Homo sapiens
  source 1..23: mol_type = other DNA
tttaaagaaaacagtgagtttgg

SEQ ID NO: 2179 - DNA, 23 bp, Homo sapiens
  source 1..23: mol_type = other DNA
catagtggaaccagagagtcaga

SEQ ID NO: 2180 - DNA, 23 bp, Homo sapiens
  source 1..23: mol_type = other DNA
tttaggaaaacaatagagtgagt

SEQ ID NO: 2181 - DNA, 23 bp, Homo sapiens
  source 1..23: mol_type = other DNA
catatgaataccagagagtaaga

SEQ ID NO: 2182 - DNA, 23 bp, Homo sapiens
  source 1..23: mol_type = other DNA
gataggaatagcactgaatctgt

SEQ ID NO: 2183 - DNA, 23 bp, Homo sapiens
  source 1..23: mol_type = other DNA
cataggagaactagtgacattgg

SEQ ID NO: 2184 - DNA, 23 bp, Homo sapiens
  source 1..23: mol_type = other DNA
tggaggaaaaacagtgggccggg

SEQ ID NO: 2185 - DNA, 24 bp, Homo sapiens
  source 1..24: mol_type = other DNA
tagagtgaaaaccactgaatcagg

SEQ ID NO: 2186 - DNA, 24 bp, Homo sapiens
  source 1..24: mol_type = other DNA
gataggagaaacctttgagtccag

SEQ ID NO: 2187 - DNA, 24 bp, Homo sapiens
  source 1..24: mol_type = other DNA
taaaggtgaatcagtgaagtcagg

SEQ ID NO: 2188 - DNA, 22 bp, Homo sapiens
  source 1..22: mol_type = other DNA
tagaggaatcctgtgagtcttg

SEQ ID NO: 2189 - DNA, 22 bp, Homo sapiens
  source 1..22: mol_type = other DNA
tgtaggagtcccatgagtctgg

SEQ ID NO: 2190 - DNA, 22 bp, Homo sapiens
  source 1..22: mol_type = other DNA
aataggaaaactaggaggaggg

SEQ ID NO: 2191 - DNA, 21 bp, Homo sapiens
  source 1..21: mol_type = other DNA
tacagtaaccagtgattctgg

SEQ ID NO: 2192 - DNA, 21 bp, Homo sapiens
  source 1..21: mol_type = other DNA
aataggaaaatcaaagtcagg

SEQ ID NO: 2193 - DNA, 23 bp, Homo sapiens
  source 1..23: mol_type = other DNA
tctaggaaaaaaggtgaggtggg

SEQ ID NO: 2194 - DNA, 23 bp, Homo sapiens
  source 1..23: mol_type = other DNA
tatcctataaccagtgaatcctg

SEQ ID NO: 2195 - DNA, 23 bp, Homo sapiens
  source 1..23: mol_type = other DNA
tataggaatacttgtgatttttg

SEQ ID NO: 2196 - DNA, 23 bp, Homo sapiens
  source 1..23: mol_type = other DNA
tatagcgatagcagggagtttgg

SEQ ID NO: 2197 - DNA, 23 bp, Homo sapiens
  source 1..23: mol_type = other DNA
aatatgaaaaccagtgaaccaat

SEQ ID NO: 2198 - DNA, 23 bp, Homo sapiens
  source 1..23: mol_type = other DNA
tgtataaaactcagtgagtctga

SEQ ID NO: 2199 - DNA, 23 bp, Homo sapiens
  source 1..23: mol_type = other DNA
tgtagaaatacatttgagtctgg

SEQ ID NO: 2200 - DNA, 23 bp, Homo sapiens
  source 1..23: mol_type = other DNA
attagaataatcagtgggtctgg

SEQ ID NO: 2201 - DNA, 23 bp, Homo sapiens
  source 1..23: mol_type = other DNA
tataggaaagcctcggtgcctgg

SEQ ID NO: 2202 - DNA, 24 bp, Homo sapiens
  source 1..24: mol_type = other DNA
tttacaaaaacccagtgagacagg

SEQ ID NO: 2203 - DNA, 22 bp, Homo sapiens
  source 1..22: mol_type = other DNA
cagagaaaaccagtgaatcaga

SEQ ID NO: 2204 - DNA, 22 bp, Homo sapiens
  source 1..22: mol_type = other DNA
gatagaaaagcatagagtcagg

SEQ ID NO: 2205 - DNA, 22 bp, Homo sapiens
  source 1..22: mol_type = other DNA
tctaggaaaccagtgaatgagt

SEQ ID NO: 2206 - DNA, 22 bp, Homo sapiens
  source 1..22: mol_type = other DNA
tatagtataaccagtggtatgc

SEQ ID NO: 2207 - DNA, 22 bp, Homo sapiens
  source 1..22: mol_type = other DNA
tgatggaaaaccagtgatctgt

SEQ ID NO: 2208 - DNA, 23 bp, Homo sapiens
  source 1..23: mol_type = other DNA
catagaaagaccagtgtgtcagg

SEQ ID NO: 2209 - DNA, 23 bp, Homo sapiens
  source 1..23: mol_type = other DNA
tataggaatgcttgtgagttttg

SEQ ID NO: 2210 - DNA, 23 bp, Homo sapiens
  source 1..23: mol_type = other DNA
tatagaaaaaccaatgttttggt

SEQ ID NO: 2211 - DNA, 23 bp, Homo sapiens
  source 1..23: mol_type = other DNA
cataggaaaactagacagaatgg

SEQ ID NO: 2212 - DNA, 23 bp, Homo sapiens
  source 1..23: mol_type = other DNA
gaaatttaaaccattgagtcagg

SEQ ID NO: 2213 - DNA, 23 bp, Homo sapiens
  source 1..23: mol_type = other DNA
atctggaaacccagtgagacagg

SEQ ID NO: 2214 - DNA, 23 bp, Homo sapiens
  source 1..23: mol_type = other DNA
tataggataataaatgagtccag

SEQ ID NO: 2215 - DNA, 23 bp, Homo sapiens
  source 1..23: mol_type = other DNA
tctgggaaaagcatggagtaggg

SEQ ID NO: 2216 - DNA, 23 bp, Homo sapiens
  source 1..23: mol_type = other DNA
aagcagaaaaccagtgaggctgt

SEQ ID NO: 2217 - DNA, 23 bp, Homo sapiens
  source 1..23: mol_type = other DNA
tatagggaaagcattcagtcttt

SEQ ID NO: 2218 - DNA, 23 bp, Homo sapiens
  source 1..23: mol_type = other DNA
caaatgaaagccagtgtgacagg

SEQ ID NO: 2219 - DNA, 23 bp, Homo sapiens
  source 1..23: mol_type = other DNA
tggaggaaaaccagagatgtggg

SEQ ID NO: 2220 - DNA, 23 bp, Homo sapiens
  source 1..23: mol_type = other DNA
tacaggaaacacagaaagtctgg

SEQ ID NO: 2221 - DNA, 24 bp, Homo sapiens
  source 1..24: mol_type = other DNA
tattggaacaccaagtgagctggg

SEQ ID NO: 2222 - DNA, 24 bp, Homo sapiens
  source 1..24: mol_type = other DNA
tataaggaaattagtgatgtctgg

SEQ ID NO: 2223 - DNA, 25 bp, Homo sapiens
  source 1..25: mol_type = other DNA
gatagaaaaaccagtagaagtgggg

SEQ ID NO: 2224 - DNA, 22 bp, Homo sapiens
  source 1..22: mol_type = other DNA
tataaaaaagcagtgtatctgg

SEQ ID NO: 2225 - DNA, 22 bp, Homo sapiens
  source 1..22: mol_type = other DNA
aataagaaaaccagtggtgaga

SEQ ID NO: 2226 - DNA, 21 bp, Homo sapiens
  source 1..21: mol_type = other DNA
tatgagaaaaccagtggctgg

SEQ ID NO: 2227 - DNA, 22 bp, Homo sapiens
  source 1..22: mol_type = other DNA
taaagaaaaccagtgacacaag

SEQ ID NO: 2228 - DNA, 22 bp, Homo sapiens
  source 1..22: mol_type = other DNA
tataaaaatctagtgagtctgg

SEQ ID NO: 2229 - DNA, 22 bp, Homo sapiens
  source 1..22: mol_type = other DNA
tataggaaactagtgaatgtag

SEQ ID NO: 2230 - DNA, 22 bp, Homo sapiens
  source 1..22: mol_type = other DNA
aatagaaaatccagagagctgg

SEQ ID NO: 2231 - DNA, 21 bp, Homo sapiens
  source 1..21: mol_type = other DNA
tctgggaaaaccagagtaggg

SEQ ID NO: 2232 - DNA, 21 bp, Homo sapiens
  source 1..21: mol_type = other DNA
tataggtaaaccagagtaggc

SEQ ID NO: 2233 - DNA, 23 bp, Homo sapiens
  source 1..23: mol_type = other DNA
agtaggaaaaccagtatataggg

SEQ ID NO: 2234 - DNA, 23 bp, Homo sapiens
  source 1..23: mol_type = other DNA
aataggtaaaccagagagactgg

SEQ ID NO: 2235 - DNA, 23 bp, Homo sapiens
  source 1..23: mol_type = other DNA
cataggtaaaccagtgatcacag

SEQ ID NO: 2236 - DNA, 22 bp, Homo sapiens
  source 1..22: mol_type = other DNA
agtaggaaaactatgagtctgg

SEQ ID NO: 2237 - DNA, 22 bp, Homo sapiens
  source 1..22: mol_type = other DNA
catataaaaccagtgagtgggt

SEQ ID NO: 2238 - DNA, 23 bp, Homo sapiens
  source 1..23: mol_type = other DNA
tataggtaaactagtgactaggg

SEQ ID NO: 2239 - DNA, 22 bp, Homo sapiens
  source 1..22: mol_type = other DNA
agtagcaaaaccaggagccagg

SEQ ID NO: 2240 - DNA, 22 bp, Homo sapiens
  source 1..22: mol_type = other DNA
cctaggaaaccagtgagtcaaa

SEQ ID NO: 2241 - DNA, 23 bp, Homo sapiens
  source 1..23: mol_type = other DNA
ggtataaaaaccagtgagtaggg

SEQ ID NO: 2242 - DNA, 23 bp, Homo sapiens
  source 1..23: mol_type = other DNA
tatagcataaccaggagttctgg

SEQ ID NO: 2243 - DNA, 23 bp, Homo sapiens
  source 1..23: mol_type = other DNA
attaagaaaaccagtgattcaga

SEQ ID NO: 2244 - DNA, 22 bp, Homo sapiens
  source 1..22: mol_type = other DNA
caaaggaaaccagtgagttgga

SEQ ID NO: 2245 - DNA, 23 bp, Homo sapiens
  source 1..23: mol_type = other DNA
gattaggaaaccagggaatccgg

SEQ ID NO: 2246 - DNA, 21 bp, Homo sapiens
  source 1..21: mol_type = other DNA
cataggaaaacataagtctgg

SEQ ID NO: 2247 - DNA, 23 bp, Homo sapiens
  source 1..23: mol_type = other DNA
aagaggaaaaccagttagaaggc

SEQ ID NO: 2248 - DNA, 23 bp, Homo sapiens
  source 1..23: mol_type = other DNA
tataggtaaacctgtgacggggg

SEQ ID NO: 2249 - DNA, 23 bp, Homo sapiens
  source 1..23: mol_type = other DNA
aataagaagactagtgagtgggg

SEQ ID NO: 2250 - DNA, 23 bp, Homo sapiens
  source 1..23: mol_type = other DNA
ttaagaaaaaccagagagttggg

SEQ ID NO: 2251 - DNA, 22 bp, Homo sapiens
  source 1..22: mol_type = other DNA
catagtgaatccagtggtctgg

SEQ ID NO: 2252 - DNA, 23 bp, Homo sapiens
  source 1..23: mol_type = other DNA
aataagaaaatcagttagtgggt

SEQ ID NO: 2253 - DNA, 21 bp, Homo sapiens
  source 1..21: mol_type = other DNA
tatatgaacaccagtgacagg

SEQ ID NO: 2254 - DNA, 22 bp, Homo sapiens
  source 1..22: mol_type = other DNA
tgtagggaaaccaggacccagg

SEQ ID NO: 2255 - DNA, 23 bp, Homo sapiens
  source 1..23: mol_type = other DNA
ttgactaaaaccagtgagccggc

SEQ ID NO: 2256 - DNA, 23 bp, Homo sapiens
  source 1..23: mol_type = other DNA
tatataataaccagtgagatgga

SEQ ID NO: 2257 - DNA, 23 bp, Homo sapiens
  source 1..23: mol_type = other DNA
aataggaaatccagtgactccag

SEQ ID NO: 2258 - DNA, 23 bp, Homo sapiens
  source 1..23: mol_type = other DNA
aaaaagaaaatcagtgagtggga

SEQ ID NO: 2259 - DNA, 23 bp, Homo sapiens
  source 1..23: mol_type = other DNA
cctaggaaaaccaatgagaggag

SEQ ID NO: 2260 - DNA, 21 bp, Homo sapiens
  source 1..21: mol_type = other DNA
tataggactcagtgagtgggg

SEQ ID NO: 2261 - DNA, 22 bp, Homo sapiens
  source 1..22: mol_type = other DNA
tataagaaaaccaggactatgg

SEQ ID NO: 2262 - DNA, 23 bp, Homo sapiens
  source 1..23: mol_type = other DNA
cctgcaaaaaccagtgagtgggg

SEQ ID NO: 2263 - DNA, 22 bp, Homo sapiens
  source 1..22: mol_type = other DNA
agttggaaaaccactggtctgg

SEQ ID NO: 2264 - DNA, 24 bp, Homo sapiens
  source 1..24: mol_type = other DNA
tatagaggagacaagtgagtctgg

SEQ ID NO: 2265 - DNA, 23 bp, Homo sapiens
  source 1..23: mol_type = other DNA
aatacaaaaaccagtgagtgaag

SEQ ID NO: 2266 - DNA, 23 bp, Homo sapiens
  source 1..23: mol_type = other DNA
tcaaagaaaaccattgattcagg

SEQ ID NO: 2267 - DNA, 24 bp, Homo sapiens
  source 1..24: mol_type = other DNA
tgtaagaaaactagatgagtcagg

SEQ ID NO: 2268 - DNA, 22 bp, Homo sapiens
  source 1..22: mol_type = other DNA
tttatgtaaaccagtgatatgg

SEQ ID NO: 2269 - DNA, 23 bp, Homo sapiens
  source 1..23: mol_type = other DNA
aataggtaaacaagtgagcatgg

SEQ ID NO: 2270 - DNA, 22 bp, Homo sapiens
  source 1..22: mol_type = other DNA
tatacagcaaccagtagtcagg

SEQ ID NO: 2271 - DNA, 22 bp, Homo sapiens
  source 1..22: mol_type = other DNA
aacagggataccaggagtcagg

SEQ ID NO: 2272 - DNA, 24 bp, Homo sapiens
  source 1..24: mol_type = other DNA
gagagataaaactagtgagtctgg

SEQ ID NO: 2273 - DNA, 22 bp, Homo sapiens
  source 1..22: mol_type = other DNA
tacaaaaaatcagtgagtcagg

SEQ ID NO: 2274 - DNA, 21 bp, Homo sapiens
  source 1..21: mol_type = other DNA
taaaagaaaaccagtgtcatg

SEQ ID NO: 2275 - DNA, 22 bp, Homo sapiens
  source 1..22: mol_type = other DNA
aatattaaaaccatgagtaggg

SEQ ID NO: 2276 - DNA, 23 bp, Homo sapiens
  source 1..23: mol_type = other DNA
tataagaaagccagtggtatggg

SEQ ID NO: 2277 - DNA, 22 bp, Homo sapiens
  source 1..22: mol_type = other DNA
ggtagaaaaccagtgaatctga

SEQ ID NO: 2278 - DNA, 23 bp, Homo sapiens
  source 1..23: mol_type = other DNA
ttcagggagaccagtgagtggga

SEQ ID NO: 2279 - DNA, 23 bp, Homo sapiens
  source 1..23: mol_type = other DNA
gatcacaaaaccagtgagtggga

SEQ ID NO: 2280 - DNA, 23 bp, Homo sapiens
  source 1..23: mol_type = other DNA
attagcaaaaccagggagtcagg

SEQ ID NO: 2281 - DNA, 24 bp, Homo sapiens
  source 1..24: mol_type = other DNA
tagagttcaaaccagtgagtcggc

SEQ ID NO: 2282 - DNA, 22 bp, Homo sapiens
  source 1..22: mol_type = other DNA
tgtttgaaaaccatgagtccag

SEQ ID NO: 2283 - DNA, 23 bp, Homo sapiens
  source 1..23: mol_type = other DNA
agaagaaaaaccagtgatactgg

SEQ ID NO: 2284 - DNA, 23 bp, Homo sapiens
  source 1..23: mol_type = other DNA
tgtaaggaaactagtgaggctgg

SEQ ID NO: 2285 - DNA, 24 bp, Homo sapiens
  source 1..24: mol_type = other DNA
cataagaaaacttagtgagtgggg

SEQ ID NO: 2286 - DNA, 24 bp, Homo sapiens
  source 1..24: mol_type = other DNA
catagttaaaaccatagagtctgg

SEQ ID NO: 2287 - DNA, 23 bp, Homo sapiens
  source 1..23: mol_type = other DNA
aatgagaaaaccagtgaatgtgg

SEQ ID NO: 2288 - DNA, 23 bp, Homo sapiens
  source 1..23: mol_type = other DNA
tgtctgtaaaccagtgaggtagg

SEQ ID NO: 2289 - DNA, 22 bp, Homo sapiens
  source 1..22: mol_type = other DNA
tattggaaacaagtaagtctgg

SEQ ID NO: 2290 - DNA, 21 bp, Homo sapiens
  source 1..21: mol_type = other DNA
aataggaaaaccagagtagag

SEQ ID NO: 2291 - DNA, 23 bp, Homo sapiens
  source 1..23: mol_type = other DNA
tgtaggaaaaacagtgaaggtag

SEQ ID NO: 2292 - DNA, 23 bp, Homo sapiens
  source 1..23: mol_type = other DNA
aataggaaaaccagtcaggtgtg

SEQ ID NO: 2293 - DNA, 22 bp, Homo sapiens
  source 1..22: mol_type = other DNA
aataagaaaaccattgtgctgg

SEQ ID NO: 2294 - DNA, 22 bp, Homo sapiens
  source 1..22: mol_type = other DNA
gagatgaaaaccagtgttccgg

SEQ ID NO: 2295 - DNA, 25 bp, Homo sapiens
  source 1..25: mol_type = other DNA
tatagaaagtaaccagtaagtagga

SEQ ID NO: 2296 - DNA, 23 bp, Homo sapiens
  source 1..23: mol_type = other DNA
tggggggaagccagtgagccagg

SEQ ID NO: 2297 - DNA, 22 bp, Homo sapiens
  source 1..22: mol_type = other DNA
tacaggaaaccagtgggtaaag

SEQ ID NO: 2298 - DNA, 23 bp, Homo sapiens
  source 1..23: mol_type = other DNA
aaagggaaagccagtgagtcaga

SEQ ID NO: 2299 - DNA, 22 bp, Homo sapiens
  source 1..22: mol_type = other DNA
tgcaggagaccagggagtcagg

SEQ ID NO: 2300 - DNA, 22 bp, Homo sapiens
  source 1..22: mol_type = other DNA
gaaatgaaaacagtgagtctga

SEQ ID NO: 2301 - DNA, 23 bp, Homo sapiens
  source 1..23: mol_type = other DNA
ggtaggaaggccaatgagtcagg

SEQ ID NO: 2302 - DNA, 22 bp, Homo sapiens
  source 1..22: mol_type = other DNA
taaagcaaaaccatgagtcaga

SEQ ID NO: 2303 - DNA, 22 bp, Homo sapiens
  source 1..22: mol_type = other DNA
tatgggaaaatcaatgatcagg

SEQ ID NO: 2304 - DNA, 23 bp, Homo sapiens
  source 1..23: mol_type = other DNA
tgcagggaagccagtgagccggg

SEQ ID NO: 2305 - DNA, 22 bp, Homo sapiens
  source 1..22: mol_type = other DNA
gaaaggaaaatcagtgacctgg

SEQ ID NO: 2306 - DNA, 23 bp, Homo sapiens
  source 1..23: mol_type = other DNA
tatagggatgccagtgattcata

SEQ ID NO: 2307 - DNA, 22 bp, Homo sapiens
  source 1..22: mol_type = other DNA
cctaaaagaccagtgagtctgg

SEQ ID NO: 2308 - DNA, 23 bp, Homo sapiens
  source 1..23: mol_type = other DNA
tatgagaaaaccagtgaattagt

SEQ ID NO: 2309 - DNA, 23 bp, Homo sapiens
  source 1..23: mol_type = other DNA
aaaagttaaaccagtgagtccaa

SEQ ID NO: 2310 - DNA, 23 bp, Homo sapiens
  source 1..23: mol_type = other DNA
attaggaaaaccagtgaacttga

SEQ ID NO: 2311 - DNA, 24 bp, Homo sapiens
  source 1..24: mol_type = other DNA
tctagcaaaaccaggtgagtagga

SEQ ID NO: 2312 - DNA, 22 bp, Homo sapiens
  source 1..22: mol_type = other DNA
tatagtaacccagagagtatgg

SEQ ID NO: 2313 - DNA, 23 bp, Homo sapiens
  source 1..23: mol_type = other DNA
aaagggaaaacaagtaagtcaga

SEQ ID NO: 2314 - DNA, 23 bp, Homo sapiens
  source 1..23: mol_type = other DNA
tataagaaacccagagagcttgt

SEQ ID NO: 2315 - DNA, 24 bp, Homo sapiens
  source 1..24: mol_type = other DNA
gataggaaaaccaggtgagataag

SEQ ID NO: 2316 - DNA, 24 bp, Homo sapiens
  source 1..24: mol_type = other DNA
tataggtatagccagtgtgtcagg

SEQ ID NO: 2317 - DNA, 22 bp, Homo sapiens
  source 1..22: mol_type = other DNA
gaaaagaaaaccaggagccagg

SEQ ID NO: 2318 - DNA, 21 bp, Homo sapiens
  source 1..21: mol_type = other DNA
catagaaagcagtgagtcaga

SEQ ID NO: 2319 - DNA, 23 bp, Homo sapiens
  source 1..23: mol_type = other DNA
tttagataaatcagtgagtctga

SEQ ID NO: 2320 - DNA, 21 bp, Homo sapiens
  source 1..21: mol_type = other DNA
tgtaaaaaacagtgagtgtgg

SEQ ID NO: 2321 - DNA, 21 bp, Homo sapiens
  source 1..21: mol_type = other DNA
tatagtaaaaactgagtctgg

SEQ ID NO: 2322 - DNA, 22 bp, Homo sapiens
  source 1..22: mol_type = other DNA
tataggaagaacagtggtgagg

SEQ ID NO: 2323 - DNA, 23 bp, Homo sapiens
  source 1..23: mol_type = other DNA
tggaggaaaacaagggagagtgg

SEQ ID NO: 2324 - DNA, 23 bp, Homo sapiens
  source 1..23: mol_type = other DNA
tagaagaaaaccactgtgacctg

SEQ ID NO: 2325 - DNA, 23 bp, Homo sapiens
  source 1..23: mol_type = other DNA
tacaggaaaagcagggagtaacg

SEQ ID NO: 2326 - DNA, 23 bp, Homo sapiens
  source 1..23: mol_type = other DNA
tttgttaaaaccagtgagttttg

SEQ ID NO: 2327 - DNA, 23 bp, Homo sapiens
  source 1..23: mol_type = other DNA
tataaggacaccagtcagattgg

SEQ ID NO: 2328 - DNA, 23 bp, Homo sapiens
  source 1..23: mol_type = other DNA
tatagtaggaaaagtgagcctgg

SEQ ID NO: 2329 - DNA, 23 bp, Homo sapiens
  source 1..23: mol_type = other DNA
tatatggaaaaacgtgagacagg

SEQ ID NO: 2330 - DNA, 23 bp, Homo sapiens
  source 1..23: mol_type = other DNA
gataggaaaacctcttagggtgg

SEQ ID NO: 2331 - DNA, 23 bp, Homo sapiens
  source 1..23: mol_type = other DNA
tagaggaaaagcattcagtcttt

SEQ ID NO: 2332 - DNA, 23 bp, Homo sapiens
  source 1..23: mol_type = other DNA
tgtaacaaaaccagtgtgttagc

SEQ ID NO: 2333 - DNA, 23 bp, Homo sapiens
  source 1..23: mol_type = other DNA
taaaggaaaaccagtggttgtca

SEQ ID NO: 2334 - DNA, 23 bp, Homo sapiens
  source 1..23: mol_type = other DNA
tataggaaaacaactgatatttg

SEQ ID NO: 2335 - DNA, 23 bp, Homo sapiens
  source 1..23: mol_type = other DNA
tattggaaaacctgtgagtctca

SEQ ID NO: 2336 - DNA, 23 bp, Homo sapiens
  source 1..23: mol_type = other DNA
aatacgaaaaccagtcaggggtg

SEQ ID NO: 2337 - DNA, 23 bp, Homo sapiens
  source 1..23: mol_type = other DNA
tctatgaaaaccaaagagtcttt

SEQ ID NO: 2338 - DNA, 23 bp, Homo sapiens
  source 1..23: mol_type = other DNA
tatagtgaaatcaggcagtaagg

SEQ ID NO: 2339 - DNA, 23 bp, Homo sapiens
  source 1..23: mol_type = other DNA
aatagcataactagtgactctga

SEQ ID NO: 2340 - DNA, 23 bp, Homo sapiens
  source 1..23: mol_type = other DNA
tttttcaaaagcagtgagtcaag

SEQ ID NO: 2341 - DNA, 23 bp, Homo sapiens
  source 1..23: mol_type = other DNA
tgtaggaggagcagagaatctgg

SEQ ID NO: 2342 - DNA, 25 bp, Homo sapiens
  source 1..25: mol_type = other DNA
agtaggaaaaccatagtgagcaagg

SEQ ID NO: 2343 - DNA, 22 bp, Homo sapiens
  source 1..22: mol_type = other DNA
tagagaaaaccagtgactgaag

SEQ ID NO: 2344 - DNA, 22 bp, Homo sapiens
  source 1..22: mol_type = other DNA
tatagtaacaccatgagtaagt

SEQ ID NO: 2345 - DNA, 22 bp, Homo sapiens
  source 1..22: mol_type = other DNA
taatggaaaaccaggagtagga

SEQ ID NO: 2346 - DNA, 21 bp, Homo sapiens
  source 1..21: mol_type = other DNA
catagcaaaaagtgagtctag

SEQ ID NO: 2347 - DNA, 21 bp, Homo sapiens
  source 1..21: mol_type = other DNA
aacaggaaaaccagagtttgg

SEQ ID NO: 2348 - DNA, 22 bp, Homo sapiens
  source 1..22: mol_type = other DNA
tacaggaaaccagtgagtgctg

SEQ ID NO: 2349 - DNA, 22 bp, Homo sapiens
  source 1..22: mol_type = other DNA
tgtaggagaccagtgagcaggg

SEQ ID NO: 2350 - DNA, 23 bp, Homo sapiens
  source 1..23: mol_type = other DNA
tataagaataccagtgatactgg

SEQ ID NO: 2351 - DNA, 23 bp, Homo sapiens
  source 1..23: mol_type = other DNA
aatagcaaaaccagggagttggc

SEQ ID NO: 2352 - DNA, 24 bp, Homo sapiens
  source 1..24: mol_type = other DNA
aatagataaaaccagtgagttggg

SEQ ID NO: 2353 - DNA, 22 bp, Homo sapiens
  source 1..22: mol_type = other DNA
gttaggtataccagtgatctgg

SEQ ID NO: 2354 - DNA, 22 bp, Homo sapiens
  source 1..22: mol_type = other DNA
gataggaaaccagagagtatgg

SEQ ID NO: 2355 - DNA, 22 bp, Homo sapiens
  source 1..22: mol_type = other DNA
gagaggaaaaccaggagccagg

SEQ ID NO: 2356 - DNA, 22 bp, Homo sapiens
  source 1..22: mol_type = other DNA
aataagaaaccagtgagtaaga

SEQ ID NO: 2357 - DNA, 23 bp, Homo sapiens
  source 1..23: mol_type = other DNA
gataggaataccagtgaggtcag

SEQ ID NO: 2358 - DNA, 23 bp, Homo sapiens
  source 1..23: mol_type = other DNA
aataggaaaactagtgacagggc

SEQ ID NO: 2359 - DNA, 22 bp, Homo sapiens
  source 1..22: mol_type = other DNA
tttagaaaaccaatgagtaggt

SEQ ID NO: 2360 - DNA, 23 bp, Homo sapiens
  source 1..23: mol_type = other DNA
tataggaaaacaagtaagagagg

SEQ ID NO: 2361 - DNA, 22 bp, Homo sapiens
  source 1..22: mol_type = other DNA
tgtaggaatactagtagtcagg

SEQ ID NO: 2362 - DNA, 23 bp, Homo sapiens
  source 1..23: mol_type = other DNA
cagaggtaaaccagtaagtggga

SEQ ID NO: 2363 - DNA, 23 bp, Homo sapiens
  source 1..23: mol_type = other DNA
aattaggaaaccagtgagccaga

SEQ ID NO: 2364 - DNA, 22 bp, Homo sapiens
  source 1..22: mol_type = other DNA
attagggaaaccagtgagcaga

SEQ ID NO: 2365 - DNA, 22 bp, Homo sapiens
  source 1..22: mol_type = other DNA
gagaggaaaaccaggattccgg

SEQ ID NO: 2366 - DNA, 23 bp, Homo sapiens
  source 1..23: mol_type = other DNA
gagaggaaaacctgtgagctggt

SEQ ID NO: 2367 - DNA, 23 bp, Homo sapiens
  source 1..23: mol_type = other DNA
tataggaacaccagagatccagg

SEQ ID NO: 2368 - DNA, 23 bp, Homo sapiens
  source 1..23: mol_type = other DNA
actaagaaaaccaatgagtaaga

SEQ ID NO: 2369 - DNA, 22 bp, Homo sapiens
  source 1..22: mol_type = other DNA
catagaagaccagaaagtcagg

SEQ ID NO: 2370 - DNA, 22 bp, Homo sapiens
  source 1..22: mol_type = other DNA
tacaggaaaccatagagtcagg

SEQ ID NO: 2371 - DNA, 22 bp, Homo sapiens
  source 1..22: mol_type = other DNA
agtaggaaaaccaggagtgtgg

SEQ ID NO: 2372 - DNA, 22 bp, Homo sapiens
  source 1..22: mol_type = other DNA
tctaggaaaacagtgagtccag

SEQ ID NO: 2373 - DNA, 23 bp, Homo sapiens
  source 1..23: mol_type = other DNA
tataggaaacacagtgaagacag

SEQ ID NO: 2374 - DNA, 22 bp, Homo sapiens
  source 1..22: mol_type = other DNA
agtaagaaaatcaggagtcagg

SEQ ID NO: 2375 - DNA, 23 bp, Homo sapiens
  source 1..23: mol_type = other DNA
aatagtgaaaccaatgagtaaga

SEQ ID NO: 2376 - DNA, 22 bp, Homo sapiens
  source 1..22: mol_type = other DNA
tataggttcacagtaagtcagg

SEQ ID NO: 2377 - DNA, 23 bp, Homo sapiens
  source 1..23: mol_type = other DNA
agaaggaaaactagtaagtctgg

SEQ ID NO: 2378 - DNA, 23 bp, Homo sapiens
  source 1..23: mol_type = other DNA
aactataaaaccagtgagtcagt

SEQ ID NO: 2379 - DNA, 23 bp, Homo sapiens
  source 1..23: mol_type = other DNA
gtaaggaacaccagtgagtctgg

SEQ ID NO: 2380 - DNA, 22 bp, Homo sapiens
  source 1..22: mol_type = other DNA
ggcaggaaaaccaggaatcagg

SEQ ID NO: 2381 - DNA, 23 bp, Homo sapiens
  source 1..23: mol_type = other DNA
tgcaggaaaacctgtgatttggt

SEQ ID NO: 2382 - DNA, 23 bp, Homo sapiens
  source 1..23: mol_type = other DNA
tgtaggaaaaacagtaagaaggc

SEQ ID NO: 2383 - DNA, 23 bp, Homo sapiens
  source 1..23: mol_type = other DNA
agtatataaacaagtgagtctgg

SEQ ID NO: 2384 - DNA, 21 bp, Homo sapiens
  source 1..21: mol_type = other DNA
tgtagtaaaaagtgagtctgg

SEQ ID NO: 2385 - DNA, 23 bp, Homo sapiens
  source 1..23: mol_type = other DNA
tagggggaaaccagtgagccagg

SEQ ID NO: 2386 - DNA, 23 bp, Homo sapiens
  source 1..23: mol_type = other DNA
catcagtaaaccagtgagtgggc

SEQ ID NO: 2387 - DNA, 23 bp, Homo sapiens
  source 1..23: mol_type = other DNA
tacaggaaagccagtgggtctgg

SEQ ID NO: 2388 - DNA, 21 bp, Homo sapiens
  source 1..21: mol_type = other DNA
tgtaggaaagagtgagtctgg

SEQ ID NO: 2389 - DNA, 22 bp, Homo sapiens
  source 1..22: mol_type = other DNA
gataggagaaccaggaaacagg

SEQ ID NO: 2390 - DNA, 22 bp, Homo sapiens
  source 1..22: mol_type = other DNA
aataggaaaaccataaagctgg

SEQ ID NO: 2391 - DNA, 23 bp, Homo sapiens
  source 1..23: mol_type = other DNA
ttatggaaaaccactgagtctag

SEQ ID NO: 2392 - DNA, 22 bp, Homo sapiens
  source 1..22: mol_type = other DNA
tttaggaaaacagtgaatttgg

SEQ ID NO: 2393 - DNA, 22 bp, Homo sapiens
  source 1..22: mol_type = other DNA
gatagtcaaaccgtgaatcagg

SEQ ID NO: 2394 - DNA, 21 bp, Homo sapiens
  source 1..21: mol_type = other DNA
tataggttacagtgagttagg

SEQ ID NO: 2395 - DNA, 24 bp, Homo sapiens
  source 1..24: mol_type = other DNA
tataggaagacccagggagtctgg

SEQ ID NO: 2396 - DNA, 23 bp, Homo sapiens
  source 1..23: mol_type = other DNA
taaatgaaaaccagtgaggggaa

SEQ ID NO: 2397 - DNA, 23 bp, Homo sapiens
  source 1..23: mol_type = other DNA
tgtaggtaaccctttgagtcagg

SEQ ID NO: 2398 - DNA, 21 bp, Homo sapiens
  source 1..21: mol_type = other DNA
tttaagaaccactgagtcagg

SEQ ID NO: 2399 - DNA, 22 bp, Homo sapiens
  source 1..22: mol_type = other DNA
aatggaaataccaggagtcagg

SEQ ID NO: 2400 - DNA, 23 bp, Homo sapiens
  source 1..23: mol_type = other DNA
tatagaagaaccagggagatagg

SEQ ID NO: 2401 - DNA, 22 bp, Homo sapiens
  source 1..22: mol_type = other DNA
cataggaatctagtgattctgg

SEQ ID NO: 2402 - DNA, 23 bp, Homo sapiens
  source 1..23: mol_type = other DNA
tgtaggaaaaccaggatttctgg

SEQ ID NO: 2403 - DNA, 23 bp, Homo sapiens
  source 1..23: mol_type = other DNA
tgaaataaaacctgtgagtcagg

SEQ ID NO: 2404 - DNA, 21 bp, Homo sapiens
  source 1..21: mol_type = other DNA
tataggaatcagtgagtgtgc

SEQ ID NO: 2405 - DNA, 21 bp, Homo sapiens
  source 1..21: mol_type = other DNA
tataagtaaacctgtgtcggg

SEQ ID NO: 2406 - DNA, 23 bp, Homo sapiens
  source 1..23: mol_type = other DNA
gaaaggaaagccagtgagaggga

SEQ ID NO: 2407 - DNA, 22 bp, Homo sapiens
  source 1..22: mol_type = other DNA
tacagaaagccagtgagtaggg

SEQ ID NO: 2408 - DNA, 23 bp, Homo sapiens
  source 1..23: mol_type = other DNA
tttaaggacaccagtgagtctgg

SEQ ID NO: 2409 - DNA, 22 bp, Homo sapiens
  source 1..22: mol_type = other DNA
tggaggaagccagtgagtcgag

SEQ ID NO: 2410 - DNA, 23 bp, Homo sapiens
  source 1..23: mol_type = other DNA
tattgcaaaaccactgagttggt

SEQ ID NO: 2411 - DNA, 21 bp, Homo sapiens
  source 1..21: mol_type = other DNA
taaaggaaccaatgagtccag

SEQ ID NO: 2412 - DNA, 22 bp, Homo sapiens
  source 1..22: mol_type = other DNA
aatatgaaaaccagaagtccag

SEQ ID NO: 2413 - DNA, 23 bp, Homo sapiens
  source 1..23: mol_type = other DNA
tgtaggaaccccagtgagattgg

SEQ ID NO: 2414 - DNA, 23 bp, Homo sapiens
  source 1..23: mol_type = other DNA
tgtagaaaaaccaatgagtttag

SEQ ID NO: 2415 - DNA, 23 bp, Homo sapiens
  source 1..23: mol_type = other DNA
tataagaaaaccagtttaacagg

SEQ ID NO: 2416 - DNA, 23 bp, Homo sapiens
  source 1..23: mol_type = other DNA
gataagaaaaccagttaccaggg

SEQ ID NO: 2417 - DNA, 23 bp, Homo sapiens
  source 1..23: mol_type = other DNA
tataagaagaccagaatgtcagg

SEQ ID NO: 2418 - DNA, 22 bp, Homo sapiens
  source 1..22: mol_type = other DNA
tatattagaaccatgaatctgg

SEQ ID NO: 2419 - DNA, 23 bp, Homo sapiens
  source 1..23: mol_type = other DNA
tattagaaaaccagtcaggtcag

SEQ ID NO: 2420 - DNA, 22 bp, Homo sapiens
  source 1..22: mol_type = other DNA
aataggaataccagttgacagg

SEQ ID NO: 2421 - DNA, 22 bp, Homo sapiens
  source 1..22: mol_type = other DNA
tgcagcagaaccagtgatctgg

SEQ ID NO: 2422 - DNA, 23 bp, Homo sapiens
  source 1..23: mol_type = other DNA
tgaaggaagaccagagagtcaag

SEQ ID NO: 2423 - DNA, 22 bp, Homo sapiens
  source 1..22: mol_type = other DNA
aaaagaaaaactagtgagcagg

SEQ ID NO: 2424 - DNA, 23 bp, Homo sapiens
  source 1..23: mol_type = other DNA
gggaagaaaagcagtgagtcggt

SEQ ID NO: 2425 - DNA, 22 bp, Homo sapiens
  source 1..22: mol_type = other DNA
gatgtaagaccagggagtctgg

SEQ ID NO: 2426 - DNA, 23 bp, Homo sapiens
  source 1..23: mol_type = other DNA
tataggaaaaacagtgtatacaa

SEQ ID NO: 2427 - DNA, 23 bp, Homo sapiens
  source 1..23: mol_type = other DNA
tatcggaaaaccactgagctgga

SEQ ID NO: 2428 - DNA, 23 bp, Homo sapiens
  source 1..23: mol_type = other DNA
tagggggaaaccagaaagtcagg

SEQ ID NO: 2429 - DNA, 21 bp, Homo sapiens
  source 1..21: mol_type = other DNA
tctagaaaccaatgagtcaag

SEQ ID NO: 2430 - DNA, 23 bp, Homo sapiens
  source 1..23: mol_type = other DNA
gctatggaaaccagtgaatctag

SEQ ID NO: 2431 - DNA, 23 bp, Homo sapiens
  source 1..23: mol_type = other DNA
tttaggtaaaacagtgagtaagt

SEQ ID NO: 2432 - DNA, 24 bp, Homo sapiens
  source 1..24: mol_type = other DNA
tgtaaggaaaacagtagagtcagg

SEQ ID NO: 2433 - DNA, 23 bp, Homo sapiens
  source 1..23: mol_type = other DNA
aatagaaagaccattgagccggg

SEQ ID NO: 2434 - DNA, 22 bp, Homo sapiens
  source 1..22: mol_type = other DNA
gatggaaaaaccactgatcagg

SEQ ID NO: 2435 - DNA, 21 bp, Homo sapiens
  source 1..21: mol_type = other DNA
tatcggaaccagagagtcagg

SEQ ID NO: 2436 - DNA, 21 bp, Homo sapiens
  source 1..21: mol_type = other DNA
tgcaggacacagtgagtcagg

SEQ ID NO: 2437 - DNA, 22 bp, Homo sapiens
  source 1..22: mol_type = other DNA
tgtaggaaaacggtgagtctca

SEQ ID NO: 2438 - DNA, 22 bp, Homo sapiens
  source 1..22: mol_type = other DNA
tataggaaaacgatgagtaaaa

SEQ ID NO: 2439 - DNA, 22 bp, Homo sapiens
  source 1..22: mol_type = other DNA
aagagcaaaaccaggagtcaag

SEQ ID NO: 2440 - DNA, 23 bp, Homo sapiens
  source 1..23: mol_type = other DNA
ttgtgaaaaaccagagagtccag

SEQ ID NO: 2441 - DNA, 24 bp, Homo sapiens
  source 1..24: mol_type = other DNA
tatgggaaaaccaagagtgtcaag

SEQ ID NO: 2442 - DNA, 22 bp, Homo sapiens
  source 1..22: mol_type = other DNA
gataggaaaaccatgattcaga

SEQ ID NO: 2443 - DNA, 23 bp, Homo sapiens
  source 1..23: mol_type = other DNA
gatgggaagaacagtgagtgaga

SEQ ID NO: 2444 - DNA, 23 bp, Homo sapiens
  source 1..23: mol_type = other DNA
tgaggggaagccagtgagccagg

SEQ ID NO: 2445 - DNA, 23 bp, Homo sapiens
  source 1..23: mol_type = other DNA
tataggtgttccaatgagtaggg

SEQ ID NO: 2446 - DNA, 24 bp, Homo sapiens
  source 1..24: mol_type = other DNA
aagaagaaaaccagtgaagtctag

SEQ ID NO: 2447 - DNA, 22 bp, Homo sapiens
  source 1..22: mol_type = other DNA
taaagtaaaacagtgagtaagg

SEQ ID NO: 2448 - DNA, 22 bp, Homo sapiens
  source 1..22: mol_type = other DNA
tttaggagaaccaggaatgtgg

SEQ ID NO: 2449 - DNA, 23 bp, Homo sapiens
  source 1..23: mol_type = other DNA
tataagaaaaccatgaagtgaag

SEQ ID NO: 2450 - DNA, 22 bp, Homo sapiens
  source 1..22: mol_type = other DNA
aataggaaaactgtgagtagcg

SEQ ID NO: 2451 - DNA, 23 bp, Homo sapiens
  source 1..23: mol_type = other DNA
ttaagtataaccagtgaagctgg

SEQ ID NO: 2452 - DNA, 23 bp, Homo sapiens
  source 1..23: mol_type = other DNA
tgtaggaacccgagggagtctgc

SEQ ID NO: 2453 - DNA, 23 bp, Homo sapiens
  source 1..23: mol_type = other DNA
tatagaaaatgcagtgattaggg

SEQ ID NO: 2454 - DNA, 23 bp, Homo sapiens
  source 1..23: mol_type = other DNA
tagaggaaaacaagagggacatg

SEQ ID NO: 2455 - DNA, 23 bp, Homo sapiens
  source 1..23: mol_type = other DNA
cattggtaaaccagtgactgagc

SEQ ID NO: 2456 - DNA, 23 bp, Homo sapiens
  source 1..23: mol_type = other DNA
gataggaaaagcattgaatttgt

SEQ ID NO: 2457 - DNA, 23 bp, Homo sapiens
  source 1..23: mol_type = other DNA
atcaggaaaaccagttaatcaag

SEQ ID NO: 2458 - DNA, 23 bp, Homo sapiens
  source 1..23: mol_type = other DNA
aataagaaaaccatttagtcaga

SEQ ID NO: 2459 - DNA, 23 bp, Homo sapiens
  source 1..23: mol_type = other DNA
aaaaggaaaagcagggagccttg

SEQ ID NO: 2460 - DNA, 24 bp, Homo sapiens
  source 1..24: mol_type = other DNA
agaaggaaaaccaatgatgtctgg

SEQ ID NO: 2461 - DNA, 22 bp, Homo sapiens
  source 1..22: mol_type = other DNA
tatagaaaaccagagagagcag

SEQ ID NO: 2462 - DNA, 22 bp, Homo sapiens
  source 1..22: mol_type = other DNA
tataggcaaaccataaattagg

SEQ ID NO: 2463 - DNA, 22 bp, Homo sapiens
  source 1..22: mol_type = other DNA
aataggaaaaccaatagaaagg

SEQ ID NO: 2464 - DNA, 22 bp, Homo sapiens
  source 1..22: mol_type = other DNA
cataggaaaagtagagatctgg

SEQ ID NO: 2465 - DNA, 23 bp, Homo sapiens
  source 1..23: mol_type = other DNA
cttagaaaacccagtgaggccgg

SEQ ID NO: 2466 - DNA, 23 bp, Homo sapiens
  source 1..23: mol_type = other DNA
tataggtaaactagtgtcttggg

SEQ ID NO: 2467 - DNA, 23 bp, Homo sapiens
  source 1..23: mol_type = other DNA
cattgaaaaacgagtgagtcact

SEQ ID NO: 2468 - DNA, 23 bp, Homo sapiens
  source 1..23: mol_type = other DNA
cttcagaaaatcagtgagtttgg

SEQ ID NO: 2469 - DNA, 23 bp, Homo sapiens
  source 1..23: mol_type = other DNA
tctaggaaaaccagcaaatgggg

SEQ ID NO: 2470 - DNA, 23 bp, Homo sapiens
  source 1..23: mol_type = other DNA
aatagcaaaacctgagattcagc

SEQ ID NO: 2471 - DNA, 23 bp, Homo sapiens
  source 1..23: mol_type = other DNA
agtacgaaaaccagtcaggcgtg

SEQ ID NO: 2472 - DNA, 23 bp, Homo sapiens
  source 1..23: mol_type = other DNA
tataggaaacccactgtgtgcct

SEQ ID NO: 2473 - DNA, 23 bp, Homo sapiens
  source 1..23: mol_type = other DNA
tataagtaaaccaccaagtcttg

SEQ ID NO: 2474 - DNA, 23 bp, Homo sapiens
  source 1..23: mol_type = other DNA
tgtaggaaaaccaagaagtagag

SEQ ID NO: 2475 - DNA, 23 bp, Homo sapiens
  source 1..23: mol_type = other DNA
aattggcaacccaggaagtctgg

SEQ ID NO: 2476 - DNA, 23 bp, Homo sapiens
  source 1..23: mol_type = other DNA
catgagcaagccagtgaggctgg

SEQ ID NO: 2477 - DNA, 25 bp, Homo sapiens
  source 1..25: mol_type = other DNA
tatagggaaaagccagtgagaagga

SEQ ID NO: 2478 - DNA, 22 bp, Homo sapiens
  source 1..22: mol_type = other DNA
tatagaaaaacagaaagtttgg

SEQ ID NO: 2479 - DNA, 22 bp, Homo sapiens
  source 1..22: mol_type = other DNA
cagaggaaaaccaggtggccgg

SEQ ID NO: 2480 - DNA, 21 bp, Homo sapiens
  source 1..21: mol_type = other DNA
tgtaagaagcagtgagtccgg

SEQ ID NO: 2481 - DNA, 21 bp, Homo sapiens
  source 1..21: mol_type = other DNA
tctaaaaacctgtaagtctgg

SEQ ID NO: 2482 - DNA, 23 bp, Homo sapiens
  source 1..23: mol_type = other DNA
tataggaagcattttgagtctgg

SEQ ID NO: 2483 - DNA, 23 bp, Homo sapiens
  source 1..23: mol_type = other DNA
tatagaaacagaagtgaatcagt

SEQ ID NO: 2484 - DNA, 24 bp, Homo sapiens
  source 1..24: mol_type = other DNA
tataagaataccagtgaagtcaat

SEQ ID NO: 2485 - DNA, 25 bp, Homo sapiens
  source 1..25: mol_type = other DNA
tacaggagtaagccactgcgtcagg

SEQ ID NO: 2486 - DNA, 22 bp, Homo sapiens
  source 1..22: mol_type = other DNA
tcaatgaaaacagtgaatcagg

SEQ ID NO: 2487 - DNA, 22 bp, Homo sapiens
  source 1..22: mol_type = other DNA
tgagggaaaatcgtgagtctgg

SEQ ID NO: 2488 - DNA, 22 bp, Homo sapiens
  source 1..22: mol_type = other DNA
gatgggaaaaccaagactcagg

SEQ ID NO: 2489 - DNA, 22 bp, Homo sapiens
  source 1..22: mol_type = other DNA
tttaggaaaatcatgatttagg

SEQ ID NO: 2490 - DNA, 22 bp, Homo sapiens
  source 1..22: mol_type = other DNA
gatagcaaaaccatggctcagg

SEQ ID NO: 2491 - DNA, 22 bp, Homo sapiens
  source 1..22: mol_type = other DNA
tataagaacaccagtgatggga

SEQ ID NO: 2492 - DNA, 21 bp, Homo sapiens
  source 1..21: mol_type = other DNA
tataggaacacatgagtttgg

SEQ ID NO: 2493 - DNA, 21 bp, Homo sapiens
  source 1..21: mol_type = other DNA
taaaggaatacctgagactgg

SEQ ID NO: 2494 - DNA, 21 bp, Homo sapiens
  source 1..21: mol_type = other DNA
aataggaaaaccattttcagg

SEQ ID NO: 2495 - DNA, 23 bp, Homo sapiens
  source 1..23: mol_type = other DNA
aataggaaaaccagtaaaatagg

SEQ ID NO: 2496 - DNA, 23 bp, Homo sapiens
  source 1..23: mol_type = other DNA
gatagagaaactagtgagtgggg

SEQ ID NO: 2497 - DNA, 23 bp, Homo sapiens
  source 1..23: mol_type = other DNA
tagaggaaaaccagtcagtctag

SEQ ID NO: 2498 - DNA, 23 bp, Homo sapiens
  source 1..23: mol_type = other DNA
tatagaaaaaccactatgtcagg

SEQ ID NO: 2499 - DNA, 21 bp, Homo sapiens
  source 1..21: mol_type = other DNA
tataggaaaaagtgaatcagg

SEQ ID NO: 2500 - DNA, 22 bp, Homo sapiens
  source 1..22: mol_type = other DNA
tgcaggcaaaccagtggtcagg

SEQ ID NO: 2501 - DNA, 23 bp, Homo sapiens
  source 1..23: mol_type = other DNA
aggaataaaaccagtgagtgggg

SEQ ID NO: 2502 - DNA, 23 bp, Homo sapiens
  source 1..23: mol_type = other DNA
tctaggaaaaccagtggtaatgg

SEQ ID NO: 2503 - DNA, 22 bp, Homo sapiens
  source 1..22: mol_type = other DNA
tatagaaaaacaatgagtagga

SEQ ID NO: 2504 - DNA, 21 bp, Homo sapiens
  source 1..21: mol_type = other DNA
tgcaggaaccaatgagtcagg

SEQ ID NO: 2505 - DNA, 22 bp, Homo sapiens
  source 1..22: mol_type = other DNA
tatagaaatccagtgaggccag

SEQ ID NO: 2506 - DNA, 23 bp, Homo sapiens
  source 1..23: mol_type = other DNA
agcagtaaaaccattgagtcagg

SEQ ID NO: 2507 - DNA, 23 bp, Homo sapiens
  source 1..23: mol_type = other DNA
catagggaatccagtgaagtggg

SEQ ID NO: 2508 - DNA, 23 bp, Homo sapiens
  source 1..23: mol_type = other DNA
tctaggataaccagtgatttctg

SEQ ID NO: 2509 - DNA, 23 bp, Homo sapiens
  source 1..23: mol_type = other DNA
catagtagaatcagtgagtcagg

SEQ ID NO: 2510 - DNA, 23 bp, Homo sapiens
  source 1..23: mol_type = other DNA
ggagtggaaaccagtgagtcagg

SEQ ID NO: 2511 - DNA, 23 bp, Homo sapiens
  source 1..23: mol_type = other DNA
tgaggagaaaccagtgagccagg

SEQ ID NO: 2512 - DNA, 23 bp, Homo sapiens
  source 1..23: mol_type = other DNA
tgtaggaaaaccagtgaagagca

SEQ ID NO: 2513 - DNA, 23 bp, Homo sapiens
  source 1..23: mol_type = other DNA
tataggtgaatcagtgagtgagt

SEQ ID NO: 2514 - DNA, 24 bp, Homo sapiens
  source 1..24: mol_type = other DNA
tatgtggaaaaccagtgaggtgag

SEQ ID NO: 2515 - DNA, 23 bp, Homo sapiens
  source 1..23: mol_type = other DNA
tatatgaaaatcagagaatctgg

SEQ ID NO: 2516 - DNA, 23 bp, Homo sapiens
  source 1..23: mol_type = other DNA
cataggaacaccagtgacatggg

SEQ ID NO: 2517 - DNA, 23 bp, Homo sapiens
  source 1..23: mol_type = other DNA
taggggataaccagtgaattgga

SEQ ID NO: 2518 - DNA, 22 bp, Homo sapiens
  source 1..22: mol_type = other DNA
aatagaatgaccagtagtcagg

SEQ ID NO: 2519 - DNA, 23 bp, Homo sapiens
  source 1..23: mol_type = other DNA
tgagggaaaaccagtgtgtgggt

SEQ ID NO: 2520 - DNA, 21 bp, Homo sapiens
  source 1..21: mol_type = other DNA
tatatcaaccagtgagtatgg

SEQ ID NO: 2521 - DNA, 22 bp, Homo sapiens
  source 1..22: mol_type = other DNA
tcaaagaaaaccaggagtgtgg

SEQ ID NO: 2522 - DNA, 23 bp, Homo sapiens
  source 1..23: mol_type = other DNA
agttggagaaccagtgactctgg

SEQ ID NO: 2523 - DNA, 22 bp, Homo sapiens
  source 1..22: mol_type = other DNA
tatagtgtaaccattgagcagg

SEQ ID NO: 2524 - DNA, 23 bp, Homo sapiens
  source 1..23: mol_type = other DNA
tatgggaaaaccagtggcaaggg

SEQ ID NO: 2525 - DNA, 23 bp, Homo sapiens
  source 1..23: mol_type = other DNA
aacaggaaaaccagagactggga

SEQ ID NO: 2526 - DNA, 22 bp, Homo sapiens
  source 1..22: mol_type = other DNA
tataagaaaactaggaatcaga

SEQ ID NO: 2527 - DNA, 23 bp, Homo sapiens
  source 1..23: mol_type = other DNA
tagaggaaaacctgtgagtactg

SEQ ID NO: 2528 - DNA, 22 bp, Homo sapiens
  source 1..22: mol_type = other DNA
gacaagaaaaccagggatcagg

SEQ ID NO: 2529 - DNA, 23 bp, Homo sapiens
  source 1..23: mol_type = other DNA
aatagggagaccagtgagcttgg

SEQ ID NO: 2530 - DNA, 23 bp, Homo sapiens
  source 1..23: mol_type = other DNA
aatagagaacacagtgagtcaga

SEQ ID NO: 2531 - DNA, 23 bp, Homo sapiens
  source 1..23: mol_type = other DNA
aataggaaaacaactgagctggt

SEQ ID NO: 2532 - DNA, 23 bp, Homo sapiens
  source 1..23: mol_type = other DNA
tataagaatgctagtgattttgg

SEQ ID NO: 2533 - DNA, 22 bp, Homo sapiens
  source 1..22: mol_type = other DNA
aataggaaaccagtgaatcaat

SEQ ID NO: 2534 - DNA, 22 bp, Homo sapiens
  source 1..22: mol_type = other DNA
gataggaaaaccaaaagtgtgg

SEQ ID NO: 2535 - DNA, 23 bp, Homo sapiens
  source 1..23: mol_type = other DNA
taagggaaacccagtgattcagg

SEQ ID NO: 2536 - DNA, 22 bp, Homo sapiens
  source 1..22: mol_type = other DNA
tctaggaagccagagagtcagg

SEQ ID NO: 2537 - DNA, 22 bp, Homo sapiens
  source 1..22: mol_type = other DNA
gagaggaaaacagagagtctgg

SEQ ID NO: 2538 - DNA, 23 bp, Homo sapiens
  source 1..23: mol_type = other DNA
tataacaataccagagagtgggt

SEQ ID NO: 2539 - DNA, 21 bp, Homo sapiens
  source 1..21: mol_type = other DNA
tatagtagccagagagtctgg

SEQ ID NO: 2540 - DNA, 23 bp, Homo sapiens
  source 1..23: mol_type = other DNA
tatagcaaatccagcgatctggg

SEQ ID NO: 2541 - DNA, 21 bp, Homo sapiens
  source 1..21: mol_type = other DNA
tataggaaagccagagtcaga

SEQ ID NO: 2542 - DNA, 22 bp, Homo sapiens
  source 1..22: mol_type = other DNA
aataagaaaatcaggactctgg

SEQ ID NO: 2543 - DNA, 24 bp, Homo sapiens
  source 1..24: mol_type = other DNA
aataggataaaccagaaagtaagg

SEQ ID NO: 2544 - DNA, 22 bp, Homo sapiens
  source 1..22: mol_type = other DNA
tatagggaaacagaaagtaggg

SEQ ID NO: 2545 - DNA, 23 bp, Homo sapiens
  source 1..23: mol_type = other DNA
tatatgcaaaccagaaagtagga

SEQ ID NO: 2546 - DNA, 23 bp, Homo sapiens
  source 1..23: mol_type = other DNA
tataagaaaaccagagaacctag

SEQ ID NO: 2547 - DNA, 22 bp, Homo sapiens
  source 1..22: mol_type = other DNA
tataggaatacagggtgtctgg

SEQ ID NO: 2548 - DNA, 22 bp, Homo sapiens
  source 1..22: mol_type = other DNA
tagggggaagccagtgatctgg

SEQ ID NO: 2549 - DNA, 23 bp, Homo sapiens
  source 1..23: mol_type = other DNA
tgggggaaagccagtgagccggg

SEQ ID NO: 2550 - DNA, 23 bp, Homo sapiens
  source 1..23: mol_type = other DNA
ggcagggataccagtgagtctgt

SEQ ID NO: 2551 - DNA, 23 bp, Homo sapiens
  source 1..23: mol_type = other DNA
aatgtgttaaccagtgagtgagg

SEQ ID NO: 2552 - DNA, 22 bp, Homo sapiens
  source 1..22: mol_type = other DNA
tctaggaagacagtgagttggt

SEQ ID NO: 2553 - DNA, 22 bp, Homo sapiens
  source 1..22: mol_type = other DNA
tacataaaaaccagtgatgggg

SEQ ID NO: 2554 - DNA, 23 bp, Homo sapiens
  source 1..23: mol_type = other DNA
ggtaggataacaagtgagttgtg

SEQ ID NO: 2555 - DNA, 23 bp, Homo sapiens
  source 1..23: mol_type = other DNA
tacacacaaaccagggagtcggg

SEQ ID NO: 2556 - DNA, 22 bp, Homo sapiens
  source 1..22: mol_type = other DNA
tgtaggcagccagtgagtcatg

SEQ ID NO: 2557 - DNA, 22 bp, Homo sapiens
  source 1..22: mol_type = other DNA
tacaggaaaacagtgagtgagt

SEQ ID NO: 2558 - DNA, 22 bp, Homo sapiens
  source 1..22: mol_type = other DNA
taaaggtaaaccaatagtcagg

SEQ ID NO: 2559 - DNA, 23 bp, Homo sapiens
  source 1..23: mol_type = other DNA
tacctggaaaacagtgagcctgg

SEQ ID NO: 2560 - DNA, 23 bp, Homo sapiens
  source 1..23: mol_type = other DNA
agtactacaaccagtgagccagg

SEQ ID NO: 2561 - DNA, 23 bp, Homo sapiens
  source 1..23: mol_type = other DNA
cttaggaaaatcagtgagatagc

SEQ ID NO: 2562 - DNA, 24 bp, Homo sapiens
  source 1..24: mol_type = other DNA
tatcctgaaaccagtggagtctgg

SEQ ID NO: 2563 - DNA, 22 bp, Homo sapiens
  source 1..22: mol_type = other DNA
tttaagaaaacctgtggtctgg

SEQ ID NO: 2564 - DNA, 23 bp, Homo sapiens
  source 1..23: mol_type = other DNA
aatagcaaaaccaggaaatcagg

SEQ ID NO: 2565 - DNA, 23 bp, Homo sapiens
  source 1..23: mol_type = other DNA
tatagacaacacagtgagactcg

SEQ ID NO: 2566 - DNA, 23 bp, Homo sapiens
  source 1..23: mol_type = other DNA
tgtagaaaaaccagtaaggaaag

SEQ ID NO: 2567 - DNA, 23 bp, Homo sapiens
  source 1..23: mol_type = other DNA
tatatttaaagcagtaagtctgg

SEQ ID NO: 2568 - DNA, 22 bp, Homo sapiens
  source 1..22: mol_type = other DNA
tttaggaaaaccctgaatcagt

SEQ ID NO: 2569 - DNA, 22 bp, Homo sapiens
  source 1..22: mol_type = other DNA
tctaggaaacccgtgagtgagg

SEQ ID NO: 2570 - DNA, 22 bp, Homo sapiens
  source 1..22: mol_type = other DNA
tttacgaaaaccatgagtctga

SEQ ID NO: 2571 - DNA, 23 bp, Homo sapiens
  source 1..23: mol_type = other DNA
tgtagaaaaagcagtgagcaaga

SEQ ID NO: 2572 - DNA, 23 bp, Homo sapiens
  source 1..23: mol_type = other DNA
tataggaacaccagtcagatcag

SEQ ID NO: 2573 - DNA, 23 bp, Homo sapiens
  source 1..23: mol_type = other DNA
gcctggaaaaccagtgagacaga

SEQ ID NO: 2574 - DNA, 23 bp, Homo sapiens
  source 1..23: mol_type = other DNA
tacaggaaaggcagtgggtgggg

SEQ ID NO: 2575 - DNA, 23 bp, Homo sapiens
  source 1..23: mol_type = other DNA
tataggaaagcaagtgatttttg

SEQ ID NO: 2576 - DNA, 23 bp, Homo sapiens
  source 1..23: mol_type = other DNA
tttaagaaaaacagtgaggctgg

SEQ ID NO: 2577 - DNA, 22 bp, Homo sapiens
  source 1..22: mol_type = other DNA
aataggaaaaccagtgctatga

SEQ ID NO: 2578 - DNA, 21 bp, Homo sapiens
  source 1..21: mol_type = other DNA
tataggaaaaaatgagttagg

SEQ ID NO: 2579 - DNA, 21 bp, Homo sapiens
  source 1..21: mol_type = other DNA
ggtaggaaaaccattgtccgg

SEQ ID NO: 2580 - DNA, 23 bp, Homo sapiens
  source 1..23: mol_type = other DNA
tagtgtaaaacaagtgagtccag

SEQ ID NO: 2581 - DNA, 23 bp, Homo sapiens
  source 1..23: mol_type = other DNA
gatgggaaaaggagccagtctgg

SEQ ID NO: 2582 - DNA, 23 bp, Homo sapiens
  source 1..23: mol_type = other DNA
tataaggatactagtgatactgg

SEQ ID NO: 2583 - DNA, 23 bp, Homo sapiens
  source 1..23: mol_type = other DNA
tatgggaaaccgaatgaggatgg

SEQ ID NO: 2584 - DNA, 23 bp, Homo sapiens
  source 1..23: mol_type = other DNA
attaggaaaaccaggttctctgg

SEQ ID NO: 2585 - DNA, 23 bp, Homo sapiens
  source 1..23: mol_type = other DNA
tataagggaaacagggagtcagg

SEQ ID NO: 2586 - DNA, 23 bp, Homo sapiens
  source 1..23: mol_type = other DNA
tgcaggaaaacaagcgatttggg

SEQ ID NO: 2587 - DNA, 23 bp, Homo sapiens
  source 1..23: mol_type = other DNA
tataagaataacagttatactgg

SEQ ID NO: 2588 - DNA, 24 bp, Homo sapiens
  source 1..24: mol_type = other DNA
tataggagaccacagtgagaaggg

SEQ ID NO: 2589 - DNA, 22 bp, Homo sapiens
  source 1..22: mol_type = other DNA
tatagtagacaagtgagtctgt

SEQ ID NO: 2590 - DNA, 22 bp, Homo sapiens
  source 1..22: mol_type = other DNA
tttaggaaaaccagtagaaagc

SEQ ID NO: 2591 - DNA, 23 bp, Homo sapiens
  source 1..23: mol_type = other DNA
tgtatgatcaccagcgagtcatg

SEQ ID NO: 2592 - DNA, 23 bp, Homo sapiens
  source 1..23: mol_type = other DNA
tttagggaaacccatttgtctgg

SEQ ID NO: 2593 - DNA, 23 bp, Homo sapiens
  source 1..23: mol_type = other DNA
aataggaagaccagtgtgtgaaa

SEQ ID NO: 2594 - DNA, 23 bp, Homo sapiens
  source 1..23: mol_type = other DNA
cataggaaaatcagagtgctggg

SEQ ID NO: 2595 - DNA, 23 bp, Homo sapiens
  source 1..23: mol_type = other DNA
aatacgaaaaccagtcagacatg

SEQ ID NO: 2596 - DNA, 23 bp, Homo sapiens
  source 1..23: mol_type = other DNA
aattgaaaaaccagtggacctgg

SEQ ID NO: 2597 - DNA, 23 bp, Homo sapiens
  source 1..23: mol_type = other DNA
aaaaggaaaaccagtgtatcaaa

SEQ ID NO: 2598 - DNA, 25 bp, Homo sapiens
  source 1..25: mol_type = other DNA
tataggcatgaaccactgtatctgg

SEQ ID NO: 2599 - DNA, 25 bp, Homo sapiens
  source 1..25: mol_type = other DNA
tatatgaaaaccagagctatttggg

SEQ ID NO: 2600 - DNA, 21 bp, Homo sapiens
  source 1..21: mol_type = other DNA
tatagtaaaccatgagtctgg

SEQ ID NO: 2601 - DNA, 22 bp, Homo sapiens
  source 1..22: mol_type = other DNA
cataggaatccagtgagatggg

SEQ ID NO: 2602 - DNA, 23 bp, Homo sapiens
  source 1..23: mol_type = other DNA
tgtaagaataccagtgagcaggc

SEQ ID NO: 2603 - DNA, 23 bp, Homo sapiens
  source 1..23: mol_type = other DNA
aacaggaaagccagtgagcaggc

SEQ ID NO: 2604 - DNA, 22 bp, Homo sapiens
  source 1..22: mol_type = other DNA
gataggaataccagtattctgg

SEQ ID NO: 2605 - DNA, 22 bp, Homo sapiens
  source 1..22: mol_type = other DNA
tgtagtaaacaagtgagtctga

SEQ ID NO: 2606 - DNA, 22 bp, Homo sapiens
  source 1..22: mol_type = other DNA
aataggaaaccaatgaatccag

SEQ ID NO: 2607 - DNA, 23 bp, Homo sapiens
  source 1..23: mol_type = other DNA
aatgaggaaaccagtgagtgtgg

SEQ ID NO: 2608 - DNA, 22 bp, Homo sapiens
  source 1..22: mol_type = other DNA
tgtagaaaaaccatgagtcatg

SEQ ID NO: 2609 - DNA, 23 bp, Homo sapiens
  source 1..23: mol_type = other DNA
tataggaaaacagtgaagtttgg

SEQ ID NO: 2610 - DNA, 23 bp, Homo sapiens
  source 1..23: mol_type = other DNA
aataggaagaccagtgaactcag

SEQ ID NO: 2611 - DNA, 22 bp, Homo sapiens
  source 1..22: mol_type = other DNA
tataagaaaccagagaggctgg

SEQ ID NO: 2612 - DNA, 23 bp, Homo sapiens
  source 1..23: mol_type = other DNA
accaggaaaaccagtgatcatgg

SEQ ID NO: 2613 - DNA, 22 bp, Homo sapiens
  source 1..22: mol_type = other DNA
tataggtaaaccaggagtgcgg

SEQ ID NO: 2614 - DNA, 22 bp, Homo sapiens
  source 1..22: mol_type = other DNA
tatatggtacccatgagtctgg

SEQ ID NO: 2615 - DNA, 23 bp, Homo sapiens
  source 1..23: mol_type = other DNA
tctaggaaaaccaggagtgcagg

SEQ ID NO: 2616 - DNA, 23 bp, Homo sapiens
  source 1..23: mol_type = other DNA
agtaggaaaatcagtgaggaggc

SEQ ID NO: 2617 - DNA, 23 bp, Homo sapiens
  source 1..23: mol_type = other DNA
gataggaaaatcagggagtaggg

SEQ ID NO: 2618 - DNA, 22 bp, Homo sapiens
  source 1..22: mol_type = other DNA
cataggtaaaccagaagtctag

SEQ ID NO: 2619 - DNA, 24 bp, Homo sapiens
  source 1..24: mol_type = other DNA
tatgtaaagaaccagtgagtcatg

SEQ ID NO: 2620 - DNA, 22 bp, Homo sapiens
  source 1..22: mol_type = other DNA
tataggaaaccactgagggctg

SEQ ID NO: 2621 - DNA, 22 bp, Homo sapiens
  source 1..22: mol_type = other DNA
tagaggaaaatcagaagtctgg

SEQ ID NO: 2622 - DNA, 21 bp, Homo sapiens
  source 1..21: mol_type = other DNA
catagaaaccagtgagtcaaa

SEQ ID NO: 2623 - DNA, 23 bp, Homo sapiens
  source 1..23: mol_type = other DNA
aataggagaaccagagaaccagg

SEQ ID NO: 2624 - DNA, 23 bp, Homo sapiens
  source 1..23: mol_type = other DNA
agcagtaaaaccagtgaggtggg

SEQ ID NO: 2625 - DNA, 21 bp, Homo sapiens
  source 1..21: mol_type = other DNA
tataggtagaccagtgaaagg

SEQ ID NO: 2626 - DNA, 23 bp, Homo sapiens
  source 1..23: mol_type = other DNA
gatgaggaaaccagtgagtgctg

SEQ ID NO: 2627 - DNA, 22 bp, Homo sapiens
  source 1..22: mol_type = other DNA
aataagaaactagtgagtttgg

SEQ ID NO: 2628 - DNA, 22 bp, Homo sapiens
  source 1..22: mol_type = other DNA
agtaggaaaagcaggggtctgg

SEQ ID NO: 2629 - DNA, 22 bp, Homo sapiens
  source 1..22: mol_type = other DNA
gatagaaaaccagagtgtcggg

SEQ ID NO: 2630 - DNA, 21 bp, Homo sapiens
  source 1..21: mol_type = other DNA
tgtagtgaaaccagtgtccgg

SEQ ID NO: 2631 - DNA, 22 bp, Homo sapiens
  source 1..22: mol_type = other DNA
tgtgggaaaaccataagtctgg

SEQ ID NO: 2632 - DNA, 23 bp, Homo sapiens
  source 1..23: mol_type = other DNA
cctgggaaagccagtgagtagga

SEQ ID NO: 2633 - DNA, 23 bp, Homo sapiens
  source 1..23: mol_type = other DNA
tttgaggaaaccagtgagatggg

SEQ ID NO: 2634 - DNA, 22 bp, Homo sapiens
  source 1..22: mol_type = other DNA
tataggaaatacagtggtcaga

SEQ ID NO: 2635 - DNA, 23 bp, Homo sapiens
  source 1..23: mol_type = other DNA
tgtagaaaaactaatgactcggg

SEQ ID NO: 2636 - DNA, 22 bp, Homo sapiens
  source 1..22: mol_type = other DNA
tgtaggaaatccaagagcccgg

SEQ ID NO: 2637 - DNA, 24 bp, Homo sapiens
  source 1..24: mol_type = other DNA
tgaaggaaaaccagatgagtcaga

SEQ ID NO: 2638 - DNA, 23 bp, Homo sapiens
  source 1..23: mol_type = other DNA
tgaaggaaaaccagtgaataatg

SEQ ID NO: 2639 - DNA, 23 bp, Homo sapiens
  source 1..23: mol_type = other DNA
actgtgaaaaccactgagtcaga

SEQ ID NO: 2640 - DNA, 24 bp, Homo sapiens
  source 1..24: mol_type = other DNA
tgtagaaataatcagtgagtcagg

SEQ ID NO: 2641 - DNA, 22 bp, Homo sapiens
  source 1..22: mol_type = other DNA
tatagaaaaccaatgactagga

SEQ ID NO: 2642 - DNA, 22 bp, Homo sapiens
  source 1..22: mol_type = other DNA
tatggaaaaccagtttgtggga

SEQ ID NO: 2643 - DNA, 22 bp, Homo sapiens
  source 1..22: mol_type = other DNA
tatatacaaaccaggagtaggg

SEQ ID NO: 2644 - DNA, 22 bp, Homo sapiens
  source 1..22: mol_type = other DNA
catagtaaagccaggactctgg

SEQ ID NO: 2645 - DNA, 22 bp, Homo sapiens
  source 1..22: mol_type = other DNA
tataagaaaccaatgagggtgg

SEQ ID NO: 2646 - DNA, 23 bp, Homo sapiens
  source 1..23: mol_type = other DNA
aaagagaaaaccagtgagtgaga

SEQ ID NO: 2647 - DNA, 22 bp, Homo sapiens
  source 1..22: mol_type = other DNA
taaggagaaccagagagtaggc

SEQ ID NO: 2648 - DNA, 22 bp, Homo sapiens
  source 1..22: mol_type = other DNA
attaggaaatccatgattcagg

SEQ ID NO: 2649 - DNA, 23 bp, Homo sapiens
  source 1..23: mol_type = other DNA
tgtaagaagaacagtgagtcaga

SEQ ID NO: 2650 - DNA, 22 bp, Homo sapiens
  source 1..22: mol_type = other DNA
tttaggaaaccagtaattcctg

SEQ ID NO: 2651 - DNA, 21 bp, Homo sapiens
  source 1..21: mol_type = other DNA
tataggaaccaatgaatcaga

SEQ ID NO: 2652 - DNA, 23 bp, Homo sapiens
  source 1..23: mol_type = other DNA
taggcaagaaccactgagtccgg

SEQ ID NO: 2653 - DNA, 22 bp, Homo sapiens
  source 1..22: mol_type = other DNA
gacaggaaaacagtgagtgtgg

SEQ ID NO: 2654 - DNA, 22 bp, Homo sapiens
  source 1..22: mol_type = other DNA
tattctagaaccagtagtcagg

SEQ ID NO: 2655 - DNA, 23 bp, Homo sapiens
  source 1..23: mol_type = other DNA
tacaggaaaaacagtgaggtcat

SEQ ID NO: 2656 - DNA, 24 bp, Homo sapiens
  source 1..24: mol_type = other DNA
tggagaataaaccagtgagtcaga

SEQ ID NO: 2657 - DNA, 23 bp, Homo sapiens
  source 1..23: mol_type = other DNA
gacaggaaaaccagttagaaggt

SEQ ID NO: 2658 - DNA, 23 bp, Homo sapiens
  source 1..23: mol_type = other DNA
tagggaaaaaccagtgaatgagg

SEQ ID NO: 2659 - DNA, 24 bp, Homo sapiens
  source 1..24: mol_type = other DNA
catagaagaaaccagaaagtctgg

SEQ ID NO: 2660 - DNA, 22 bp, Homo sapiens
  source 1..22: mol_type = other DNA
catatgaagccagtgagttggg

SEQ ID NO: 2661 - DNA, 24 bp, Homo sapiens
  source 1..24: mol_type = other DNA
cagaggaaaaaccagtgagcctga

SEQ ID NO: 2662 - DNA, 22 bp, Homo sapiens
  source 1..22: mol_type = other DNA
gttaggaaaactatgagtttgg

SEQ ID NO: 2663 - DNA, 22 bp, Homo sapiens
  source 1..22: mol_type = other DNA
aagaggagaaccatgtgtctgg

SEQ ID NO: 2664 - DNA, 23 bp, Homo sapiens
  source 1..23: mol_type = other DNA
aagaatagaaacagtgagtcagg

SEQ ID NO: 2665 - DNA, 23 bp, Homo sapiens
  source 1..23: mol_type = other DNA
aggaataaaatcagtgagtctgg

SEQ ID NO: 2666 - DNA, 21 bp, Homo sapiens
  source 1..21: mol_type = other DNA
ggtagaacccagtgagtcagg

SEQ ID NO: 2667 - DNA, 21 bp, Homo sapiens
  source 1..21: mol_type = other DNA
tataggaaacagtgagaaatg

SEQ ID NO: 2668 - DNA, 23 bp, Homo sapiens
  source 1..23: mol_type = other DNA
tataagtaaaccagttactggag

SEQ ID NO: 2669 - DNA, 24 bp, Homo sapiens
  source 1..24: mol_type = other DNA
tgtaggatctccaagtgagtcagg

SEQ ID NO: 2670 - DNA, 23 bp, Homo sapiens
  source 1..23: mol_type = other DNA
gaaactcaaaccagagagtcggg

SEQ ID NO: 2671 - DNA, 23 bp, Homo sapiens
  source 1..23: mol_type = other DNA
tacacaaaaaccagagagcctgg

SEQ ID NO: 2672 - DNA, 23 bp, Homo sapiens
  source 1..23: mol_type = other DNA
taccgtataaccagtgagtctgg

SEQ ID NO: 2673 - DNA, 23 bp, Homo sapiens
  source 1..23: mol_type = other DNA
ttcagggacaccagtgagttgtg

SEQ ID NO: 2674 - DNA, 23 bp, Homo sapiens
  source 1..23: mol_type = other DNA
gtaagaagaaccagggagtcagg

SEQ ID NO: 2675 - DNA, 23 bp, Homo sapiens
  source 1..23: mol_type = other DNA
tgttgaattaccagtgagttagg

SEQ ID NO: 2676 - DNA, 22 bp, Homo sapiens
  source 1..22: mol_type = other DNA
tgttgaaaaccagtgggttagg

SEQ ID NO: 2677 - DNA, 23 bp, Homo sapiens
  source 1..23: mol_type = other DNA
tagaggaagacaggggagtctgt

SEQ ID NO: 2678 - DNA, 23 bp, Homo sapiens
  source 1..23: mol_type = other DNA
tctaagcaaaccagtaagtgagg

SEQ ID NO: 2679 - DNA, 23 bp, Homo sapiens
  source 1..23: mol_type = other DNA
tataggaaagctagtgattttta

SEQ ID NO: 2680 - DNA, 23 bp, Homo sapiens
  source 1..23: mol_type = other DNA
aatagaaagaccaatgagactgt

SEQ ID NO: 2681 - DNA, 23 bp, Homo sapiens
  source 1..23: mol_type = other DNA
tgcagacaagccagtgagttggg

SEQ ID NO: 2682 - DNA, 23 bp, Homo sapiens
  source 1..23: mol_type = other DNA
tttaggtaaaccagagtttctgg

SEQ ID NO: 2683 - DNA, 22 bp, Homo sapiens
  source 1..22: mol_type = other DNA
tataagaatccagtgagacggc

SEQ ID NO: 2684 - DNA, 23 bp, Homo sapiens
  source 1..23: mol_type = other DNA
tataggaaagcctctgagacagg

SEQ ID NO: 2685 - DNA, 23 bp, Homo sapiens
  source 1..23: mol_type = other DNA
agtaggaaaaccaggggacctgg

SEQ ID NO: 2686 - DNA, 23 bp, Homo sapiens
  source 1..23: mol_type = other DNA
tacaggaggaccagagagccatg

SEQ ID NO: 2687 - DNA, 23 bp, Homo sapiens
  source 1..23: mol_type = other DNA
ctaagccaagccagtgagtcagg

SEQ ID NO: 2688 - DNA, 22 bp, Homo sapiens
  source 1..22: mol_type = other DNA
tataggcaaaccaatggtccca

SEQ ID NO: 2689 - DNA, 22 bp, Homo sapiens
  source 1..22: mol_type = other DNA
tataagaaaaccaatgttcaga

SEQ ID NO: 2690 - DNA, 22 bp, Homo sapiens
  source 1..22: mol_type = other DNA
aatagaaaaactagtggtctga

SEQ ID NO: 2691 - DNA, 23 bp, Homo sapiens
  source 1..23: mol_type = other DNA
tataggaaaaccaatgagtgacc

SEQ ID NO: 2692 - DNA, 23 bp, Homo sapiens
  source 1..23: mol_type = other DNA
ttatggaaacccagtaagtgggg

SEQ ID NO: 2693 - DNA, 23 bp, Homo sapiens
  source 1..23: mol_type = other DNA
atttggaaaagaagtgagtttgg

SEQ ID NO: 2694 - DNA, 23 bp, Homo sapiens
  source 1..23: mol_type = other DNA
taaagtaaatctaatgagtcaga

SEQ ID NO: 2695 - DNA, 23 bp, Homo sapiens
  source 1..23: mol_type = other DNA
tataggaaatccagtaaattaat

SEQ ID NO: 2696 - DNA, 23 bp, Homo sapiens
  source 1..23: mol_type = other DNA
taaaggaaaacattttagtctga

SEQ ID NO: 2697 - DNA, 23 bp, Homo sapiens
  source 1..23: mol_type = other DNA
tataggatggacaatgagtttgg

SEQ ID NO: 2698 - DNA, 22 bp, Homo sapiens
  source 1..22: mol_type = other DNA
tatagataaaccagtgctctga

SEQ ID NO: 2699 - DNA, 21 bp, Homo sapiens
  source 1..21: mol_type = other DNA
tataggaaaactagtatctga

SEQ ID NO: 2700 - DNA, 22 bp, Homo sapiens
  source 1..22: mol_type = other DNA
aaaaggaaaaccagagatgtgg

SEQ ID NO: 2701 - DNA, 23 bp, Homo sapiens
  source 1..23: mol_type = other DNA
aataggaaacccactgggtctgc

SEQ ID NO: 2702 - DNA, 23 bp, Homo sapiens
  source 1..23: mol_type = other DNA
tacaggagaaccaggtattatgg

SEQ ID NO: 2703 - DNA, 23 bp, Homo sapiens
  source 1..23: mol_type = other DNA
tttaggaaaagcagagtgcctgg

SEQ ID NO: 2704 - DNA, 23 bp, Homo sapiens
  source 1..23: mol_type = other DNA
aataggaaaaccagtcaggcttg

SEQ ID NO: 2705 - DNA, 23 bp, Homo sapiens
  source 1..23: mol_type = other DNA
tttaagaaaaccagtgagggatt

SEQ ID NO: 2706 - DNA, 23 bp, Homo sapiens
  source 1..23: mol_type = other DNA
tgtaggaaaaacagtgtgtgtgt

SEQ ID NO: 2707 - DNA, 23 bp, Homo sapiens
  source 1..23: mol_type = other DNA
ggtaggaagaccattgaggatgg

SEQ ID NO: 2708 - DNA, 24 bp, Homo sapiens
  source 1..24: mol_type = other DNA
tacatgtaaaaacagtgagtcaag

SEQ ID NO: 2709 - DNA, 24 bp, Homo sapiens
  source 1..24: mol_type = other DNA
tataggaaaacctagttatccaga

SEQ ID NO: 2710 - DNA, 22 bp, Homo sapiens
  source 1..22: mol_type = other DNA
tttaggaaaaacagtggtcatg

SEQ ID NO: 2711 - DNA, 21 bp, Homo sapiens
  source 1..21: mol_type = other DNA
taaaggaatacctgaggctgg

SEQ ID NO: 2712 - DNA, 22 bp, Homo sapiens
  source 1..22: mol_type = other DNA
tggaggaaaaccagtattgcgg

SEQ ID NO: 2713 - DNA, 23 bp, Homo sapiens
  source 1..23: mol_type = other DNA
taaaggtaaacctgtgtcttggg

SEQ ID NO: 2714 - DNA, 23 bp, Homo sapiens
  source 1..23: mol_type = other DNA
tgtaggaaagacagtgggtgctg

SEQ ID NO: 2715 - DNA, 23 bp, Homo sapiens
  source 1..23: mol_type = other DNA
taaaagaaaaacactgagacaga

SEQ ID NO: 2716 - DNA, 23 bp, Homo sapiens
  source 1..23: mol_type = other DNA
aaaaggagaaggagagagtccgg

SEQ ID NO: 2717 - DNA, 23 bp, Homo sapiens
  source 1..23: mol_type = other DNA
tagggcaaaaccagtaagtgctg

SEQ ID NO: 2718 - DNA, 23 bp, Homo sapiens
  source 1..23: mol_type = other DNA
tatagatctagaagtgagtctgg

SEQ ID NO: 2719 - DNA, 25 bp, Homo sapiens
  source 1..25: mol_type = other DNA
tataggaaaaccatcaggattctgg

SEQ ID NO: 2720 - DNA, 22 bp, Homo sapiens
  source 1..22: mol_type = other DNA
tataagaaagctatgaatctgg

SEQ ID NO: 2721 - DNA, 22 bp, Homo sapiens
  source 1..22: mol_type = other DNA
aatagggaaaccaggaatcggc

SEQ ID NO: 2722 - DNA, 22 bp, Homo sapiens
  source 1..22: mol_type = other DNA
tatagaaaaagcaggagtcaaa

SEQ ID NO: 2723 - DNA, 22 bp, Homo sapiens
  source 1..22: mol_type = other DNA
tttattaaaactaggagtcagg

SEQ ID NO: 2724 - DNA, 22 bp, Homo sapiens
  source 1..22: mol_type = other DNA
catacgaagtccatgagtcagg

SEQ ID NO: 2725 - DNA, 23 bp, Homo sapiens
  source 1..23: mol_type = other DNA
atatggaaaaccagagaatcagg

SEQ ID NO: 2726 - DNA, 23 bp, Homo sapiens
  source 1..23: mol_type = other DNA
tacaggaaaaccagagagtgggc

SEQ ID NO: 2727 - DNA, 22 bp, Homo sapiens
  source 1..22: mol_type = other DNA
cataggaaaatcaggaatcagg

SEQ ID NO: 2728 - DNA, 22 bp, Homo sapiens
  source 1..22: mol_type = other DNA
tataagaaactagtgattctgg

SEQ ID NO: 2729 - DNA, 23 bp, Homo sapiens
  source 1..23: mol_type = other DNA
atcaggaaaaccagtgagaaggc

SEQ ID NO: 2730 - DNA, 22 bp, Homo sapiens
  source 1..22: mol_type = other DNA
aataagaaacccagtggtcagg

SEQ ID NO: 2731 - DNA, 23 bp, Homo sapiens
  source 1..23: mol_type = other DNA
tataaggaaaccagtgatattgg

SEQ ID NO: 2732 - DNA, 22 bp, Homo sapiens
  source 1..22: mol_type = other DNA
aataggtaaacagtgagcctgg

SEQ ID NO: 2733 - DNA, 22 bp, Homo sapiens
  source 1..22: mol_type = other DNA
cataggaaaccagagactcaag

SEQ ID NO: 2734 - DNA, 23 bp, Homo sapiens
  source 1..23: mol_type = other DNA
gtgaggaaaaccagtgtgttggg

SEQ ID NO: 2735 - DNA, 22 bp, Homo sapiens
  source 1..22: mol_type = other DNA
aatatgaaaaccaggagtatgg

SEQ ID NO: 2736 - DNA, 22 bp, Homo sapiens
  source 1..22: mol_type = other DNA
cttaggaaaccagtgactaggg

SEQ ID NO: 2737 - DNA, 23 bp, Homo sapiens
  source 1..23: mol_type = other DNA
tataggagatccagtgagacctg

SEQ ID NO: 2738 - DNA, 21 bp, Homo sapiens
  source 1..21: mol_type = other DNA
tgtaagaaacagtaagtcagg

SEQ ID NO: 2739 - DNA, 21 bp, Homo sapiens
  source 1..21: mol_type = other DNA
tataagaaaaccagttacggg

SEQ ID NO: 2740 - DNA, 23 bp, Homo sapiens
  source 1..23: mol_type = other DNA
tagagggaaaccagtgagccagg

SEQ ID NO: 2741 - DNA, 23 bp, Homo sapiens
  source 1..23: mol_type = other DNA
taaaggaaaaccaatgaatgcag

SEQ ID NO: 2742 - DNA, 22 bp, Homo sapiens
  source 1..22: mol_type = other DNA
aatgtgtaaaccagtgatctgg

SEQ ID NO: 2743 - DNA, 23 bp, Homo sapiens
  source 1..23: mol_type = other DNA
attagcaaaaccagtggctctgg

SEQ ID NO: 2744 - DNA, 23 bp, Homo sapiens
  source 1..23: mol_type = other DNA
tgaaggaagaccagtgagtcgag

SEQ ID NO: 2745 - DNA, 22 bp, Homo sapiens
  source 1..22: mol_type = other DNA
tatttaaaaccagtgagttgga

SEQ ID NO: 2746 - DNA, 22 bp, Homo sapiens
  source 1..22: mol_type = other DNA
tatggaaaaccacagaatcagg

SEQ ID NO: 2747 - DNA, 22 bp, Homo sapiens
  source 1..22: mol_type = other DNA
gtctggaaaaccagtagtcagg

SEQ ID NO: 2748 - DNA, 22 bp, Homo sapiens
  source 1..22: mol_type = other DNA
gagaggaaaaccaggagtgtgg

SEQ ID NO: 2749 - DNA, 22 bp, Homo sapiens
  source 1..22: mol_type = other DNA
aataagaaaacagtgaataagg

SEQ ID NO: 2750 - DNA, 23 bp, Homo sapiens
  source 1..23: mol_type = other DNA
ggtaggaaaccaggtgagtgagg

SEQ ID NO: 2751 - DNA, 23 bp, Homo sapiens
  source 1..23: mol_type = other DNA
aattaggaaatcagtgaatctgg

SEQ ID NO: 2752 - DNA, 22 bp, Homo sapiens
  source 1..22: mol_type = other DNA
tgtaggaaggccagtgatcaag

SEQ ID NO: 2753 - DNA, 23 bp, Homo sapiens
  source 1..23: mol_type = other DNA
tgcagggaaaccagagagctggg

SEQ ID NO: 2754 - DNA, 23 bp, Homo sapiens
  source 1..23: mol_type = other DNA
actaggaaaaccactgggtcagg

SEQ ID NO: 2755 - DNA, 23 bp, Homo sapiens
  source 1..23: mol_type = other DNA
tgtgggaaaaccagggaggcagg

SEQ ID NO: 2756 - DNA, 22 bp, Homo sapiens
  source 1..22: mol_type = other DNA
acaagaaaaaccaggagtcagg

SEQ ID NO: 2757 - DNA, 22 bp, Homo sapiens
  source 1..22: mol_type = other DNA
tttaggaaaaccagaaataggg

SEQ ID NO: 2758 - DNA, 22 bp, Homo sapiens
  source 1..22: mol_type = other DNA
tgtagcaaaaccagtggtcagc

SEQ ID NO: 2759 - DNA, 23 bp, Homo sapiens
  source 1..23: mol_type = other DNA
tcaagaaataccagtgagttggc

SEQ ID NO: 2760 - DNA, 23 bp, Homo sapiens
  source 1..23: mol_type = other DNA
aatgaggaaactagtgagtctgg

SEQ ID NO: 2761 - DNA, 23 bp, Homo sapiens
  source 1..23: mol_type = other DNA
tattggaaaaccagtgagaaaag

SEQ ID NO: 2762 - DNA, 23 bp, Homo sapiens
  source 1..23: mol_type = other DNA
agtaggaaaaaaagtgattctgg

SEQ ID NO: 2763 - DNA, 23 bp, Homo sapiens
  source 1..23: mol_type = other DNA
aaaagtaaaaccagtgagactgg

SEQ ID NO: 2764 - DNA, 24 bp, Homo sapiens
  source 1..24: mol_type = other DNA
cttaggaaaacctagtgaggtcgg

SEQ ID NO: 2765 - DNA, 22 bp, Homo sapiens
  source 1..22: mol_type = other DNA
tatgggaaaaccagaattcggg

SEQ ID NO: 2766 - DNA, 23 bp, Homo sapiens
  source 1..23: mol_type = other DNA
catattaaaaccagtgagagagg

SEQ ID NO: 2767 - DNA, 22 bp, Homo sapiens
  source 1..22: mol_type = other DNA
gataagaaaaccagggatcaga

SEQ ID NO: 2768 - DNA, 23 bp, Homo sapiens
  source 1..23: mol_type = other DNA
tacaggaaaaccagagatcaaag

SEQ ID NO: 2769 - DNA, 22 bp, Homo sapiens
  source 1..22: mol_type = other DNA
cataagaatccagggagtcagg

SEQ ID NO: 2770 - DNA, 22 bp, Homo sapiens
  source 1..22: mol_type = other DNA
tatcagtaaaccataagtctgg

SEQ ID NO: 2771 - DNA, 23 bp, Homo sapiens
  source 1..23: mol_type = other DNA
ataaggaaaaccagtgtgtctaa

SEQ ID NO: 2772 - DNA, 23 bp, Homo sapiens
  source 1..23: mol_type = other DNA
tataggaaacccagtgaccttca

SEQ ID NO: 2773 - DNA, 21 bp, Homo sapiens
  source 1..21: mol_type = other DNA
aatatgaaaaccagagactgg

SEQ ID NO: 2774 - DNA, 22 bp, Homo sapiens
  source 1..22: mol_type = other DNA
aatgagtaaaccagtagtcagg

SEQ ID NO: 2775 - DNA, 23 bp, Homo sapiens
  source 1..23: mol_type = other DNA
tataggaaaatcagtatatacag

SEQ ID NO: 2776 - DNA, 23 bp, Homo sapiens
  source 1..23: mol_type = other DNA
tataaggacaccagtgagattgg

SEQ ID NO: 2777 - DNA, 22 bp, Homo sapiens
  source 1..22: mol_type = other DNA
cccaggaaaaccagtggtgtgg

SEQ ID NO: 2778 - DNA, 22 bp, Homo sapiens
  source 1..22: mol_type = other DNA
tatagggaatacctgagtctgg

SEQ ID NO: 2779 - DNA, 22 bp, Homo sapiens
  source 1..22: mol_type = other DNA
actgggagaaccatgagtcggg

SEQ ID NO: 2780 - DNA, 23 bp, Homo sapiens
  source 1..23: mol_type = other DNA
aatctgaaaaacagtgagtaggt

SEQ ID NO: 2781 - DNA, 23 bp, Homo sapiens
  source 1..23: mol_type = other DNA
tcaaagaaagccagtgagttgga

SEQ ID NO: 2782 - DNA, 22 bp, Homo sapiens
  source 1..22: mol_type = other DNA
tttagaggaccagtgagttggg

SEQ ID NO: 2783 - DNA, 23 bp, Homo sapiens
  source 1..23: mol_type = other DNA
gctacgtaaaccagtgagccagg

SEQ ID NO: 2784 - DNA, 24 bp, Homo sapiens
  source 1..24: mol_type = other DNA
caaaggagaaaccagtaagtaggg

SEQ ID NO: 2785 - DNA, 22 bp, Homo sapiens
  source 1..22: mol_type = other DNA
aaatggaaaaccagtggtctag

SEQ ID NO: 2786 - DNA, 23 bp, Homo sapiens
  source 1..23: mol_type = other DNA
tagataaaaacaagtgagtctgg

SEQ ID NO: 2787 - DNA, 23 bp, Homo sapiens
  source 1..23: mol_type = other DNA
gaaaggaaaaacagtgagtagag

SEQ ID NO: 2788 - DNA, 23 bp, Homo sapiens
  source 1..23: mol_type = other DNA
aagtggaaaatcagtgattcagg

SEQ ID NO: 2789 - DNA, 22 bp, Homo sapiens
  source 1..22: mol_type = other DNA
tattagaaaaccaatgataggg

SEQ ID NO: 2790 - DNA, 23 bp, Homo sapiens
  source 1..23: mol_type = other DNA
gataggaaaatcagtgagcatga

SEQ ID NO: 2791 - DNA, 23 bp, Homo sapiens
  source 1..23: mol_type = other DNA
actaggaaaaccaatgaatgtgt

SEQ ID NO: 2792 - DNA, 22 bp, Homo sapiens
  source 1..22: mol_type = other DNA
cttaggaaaaccagggagcagc

SEQ ID NO: 2793 - DNA, 22 bp, Homo sapiens
  source 1..22: mol_type = other DNA
tgtggaataccagaaagtcggg

SEQ ID NO: 2794 - DNA, 22 bp, Homo sapiens
  source 1..22: mol_type = other DNA
gagaggaaaatcaggaatcagg

SEQ ID NO: 2795 - DNA, 22 bp, Homo sapiens
  source 1..22: mol_type = other DNA
aatagaaaaaccaatggtcaga

SEQ ID NO: 2796 - DNA, 22 bp, Homo sapiens
  source 1..22: mol_type = other DNA
tataagaaaacagtaaatctga

SEQ ID NO: 2797 - DNA, 22 bp, Homo sapiens
  source 1..22: mol_type = other DNA
tgtaagaaaacattgagtcaga

SEQ ID NO: 2798 - DNA, 23 bp, Homo sapiens
  source 1..23: mol_type = other DNA
tgtaggaaaacaagagaatacag

SEQ ID NO: 2799 - DNA, 24 bp, Homo sapiens
  source 1..24: mol_type = other DNA
catagtaaaactagtaagatctgg

SEQ ID NO: 2800 - DNA, 25 bp, Homo sapiens
  source 1..25: mol_type = other DNA
agtaggaaaactagtgaaaatctgg

SEQ ID NO: 2801 - DNA, 22 bp, Homo sapiens
  source 1..22: mol_type = other DNA
tagggaaaaccagtggatcaag

SEQ ID NO: 2802 - DNA, 22 bp, Homo sapiens
  source 1..22: mol_type = other DNA
tatacaaaaaccagaagtcggc

SEQ ID NO: 2803 - DNA, 22 bp, Homo sapiens
  source 1..22: mol_type = other DNA
tatagtaaacccagtagtgagg

SEQ ID NO: 2804 - DNA, 21 bp, Homo sapiens
  source 1..21: mol_type = other DNA
tgtaggaaacagtgattctag

SEQ ID NO: 2805 - DNA, 23 bp, Homo sapiens
  source 1..23: mol_type = other DNA
tgtaggaatcccagtgaggggtg

SEQ ID NO: 2806 - DNA, 23 bp, Homo sapiens
  source 1..23: mol_type = other DNA
tataggaactccagtgagggcta

SEQ ID NO: 2807 - DNA, 23 bp, Homo sapiens
  source 1..23: mol_type = other DNA
aataggaaaaacagtagaacagg

SEQ ID NO: 2808 - DNA, 23 bp, Homo sapiens
  source 1..23: mol_type = other DNA
taagctgaaaccagtgagcctgg

SEQ ID NO: 2809 - DNA, 23 bp, Homo sapiens
  source 1..23: mol_type = other DNA
gaaaggaaaatcagtgaggaggc

SEQ ID NO: 2810 - DNA, 23 bp, Homo sapiens
  source 1..23: mol_type = other DNA
cataagaaaaccagtaagtttag

SEQ ID NO: 2811 - DNA, 23 bp, Homo sapiens
  source 1..23: mol_type = other DNA
tcaatacaaaccagtgagtcccg

SEQ ID NO: 2812 - DNA, 23 bp, Homo sapiens
  source 1..23: mol_type = other DNA
tgtaggctgaccagtgagctggg

SEQ ID NO: 2813 - DNA, 22 bp, Homo sapiens
  source 1..22: mol_type = other DNA
aaaaggaaaactatgagtcagg

SEQ ID NO: 2814 - DNA, 24 bp, Homo sapiens
  source 1..24: mol_type = other DNA
tctacaaataaccagtgagcctgg

SEQ ID NO: 2815 - DNA, 22 bp, Homo sapiens
  source 1..22: mol_type = other DNA
gataagaaaaccaatattcagg

SEQ ID NO: 2816 - DNA, 23 bp, Homo sapiens
  source 1..23: mol_type = other DNA
tggggggaaaccagtgagccaag

SEQ ID NO: 2817 - DNA, 23 bp, Homo sapiens
  source 1..23: mol_type = other DNA
aaacagaaaaccaatgagtctgc

SEQ ID NO: 2818 - DNA, 23 bp, Homo sapiens
  source 1..23: mol_type = other DNA
tataggagttccagtgagacttg

SEQ ID NO: 2819 - DNA, 24 bp, Homo sapiens
  source 1..24: mol_type = other DNA
tagaaaaataaccagtgagttggg

SEQ ID NO: 2820 - DNA, 22 bp, Homo sapiens
  source 1..22: mol_type = other DNA
cataggaaaagcagtattctgc

SEQ ID NO: 2821 - DNA, 23 bp, Homo sapiens
  source 1..23: mol_type = other DNA
gataggtaaacaagtgggtatga

SEQ ID NO: 2822 - DNA, 23 bp, Homo sapiens
  source 1..23: mol_type = other DNA
gaaggcaaaaccagtgaggcctg

SEQ ID NO: 2823 - DNA, 23 bp, Homo sapiens
  source 1..23: mol_type = other DNA
tataggaatgccaatgatttttg

SEQ ID NO: 2824 - DNA, 22 bp, Homo sapiens
  source 1..22: mol_type = other DNA
aataagaaaacagtggttctgg

SEQ ID NO: 2825 - DNA, 23 bp, Homo sapiens
  source 1..23: mol_type = other DNA
cctaggaaaaccaatgaggcctc

SEQ ID NO: 2826 - DNA, 23 bp, Homo sapiens
  source 1..23: mol_type = other DNA
cttaggaaagccagtgaatactg

SEQ ID NO: 2827 - DNA, 23 bp, Homo sapiens
  source 1..23: mol_type = other DNA
tggaggaaaactagtgatttagg

SEQ ID NO: 2828 - DNA, 23 bp, Homo sapiens
  source 1..23: mol_type = other DNA
tctaagaaaaccactgaatcaga

SEQ ID NO: 2829 - DNA, 22 bp, Homo sapiens
  source 1..22: mol_type = other DNA
tgtaggaaagccaagagcctgg

SEQ ID NO: 2830 - DNA, 22 bp, Homo sapiens
  source 1..22: mol_type = other DNA
ggaaggaaaaccaggagtgagg

SEQ ID NO: 2831 - DNA, 22 bp, Homo sapiens
  source 1..22: mol_type = other DNA
gatatgaatccagggagtctgg

SEQ ID NO: 2832 - DNA, 22 bp, Homo sapiens
  source 1..22: mol_type = other DNA
tttaggaaaaccaatggtatga

SEQ ID NO: 2833 - DNA, 22 bp, Homo sapiens
  source 1..22: mol_type = other DNA
taaggcaaaaccagtggttagg

SEQ ID NO: 2834 - DNA, 23 bp, Homo sapiens
  source 1..23: mol_type = other DNA
tggaagaaaagcagtgagcaagg

SEQ ID NO: 2835 - DNA, 23 bp, Homo sapiens
  source 1..23: mol_type = other DNA
tatcagaaaaatcatgagtctgg

SEQ ID NO: 2836 - DNA, 23 bp, Homo sapiens
  source 1..23: mol_type = other DNA
tcaattaaaaccagtaagtcttg

SEQ ID NO: 2837 - DNA, 23 bp, Homo sapiens
  source 1..23: mol_type = other DNA
tataggcaaatcattgtttctgc

SEQ ID NO: 2838 - DNA, 22 bp, Homo sapiens
  source 1..22: mol_type = other DNA
tataggaaaatcaatagtctgt

SEQ ID NO: 2839 - DNA, 23 bp, Homo sapiens
  source 1..23: mol_type = other DNA
aatagaagatccagtgaatctgc

SEQ ID NO: 2840 - DNA, 23 bp, Homo sapiens
  source 1..23: mol_type = other DNA
caaagcaaaaccattgggacagg

SEQ ID NO: 2841 - DNA, 23 bp, Homo sapiens
  source 1..23: mol_type = other DNA
taaaggaaaaacagttttttggg

SEQ ID NO: 2842 - DNA, 22 bp, Homo sapiens
  source 1..22: mol_type = other DNA
catagaaaaccaggtggtcagg

SEQ ID NO: 2843 - DNA, 22 bp, Homo sapiens
  source 1..22: mol_type = other DNA
tgtaggaaaccaaggagacagg

SEQ ID NO: 2844 - DNA, 22 bp, Homo sapiens
  source 1..22: mol_type = other DNA
cacaggaagaccatgaatctgg

SEQ ID NO: 2845 - DNA, 21 bp, Homo sapiens
  source 1..21: mol_type = other DNA
tataggagccaatgagtaggg

SEQ ID NO: 2846 - DNA, 21 bp, Homo sapiens
  source 1..21: mol_type = other DNA
tataagaaaactagggtcagg

SEQ ID NO: 2847 - DNA, 22 bp, Homo sapiens
  source 1..22: mol_type = other DNA
tataggaaaccagtaaagctga

SEQ ID NO: 2848 - DNA, 22 bp, Homo sapiens
  source 1..22: mol_type = other DNA
tgtaggaaaagagtaattcagg

SEQ ID NO: 2849 - DNA, 22 bp, Homo sapiens
  source 1..22: mol_type = other DNA
tataagaaaaccaatattcttg

SEQ ID NO: 2850 - DNA, 22 bp, Homo sapiens
  source 1..22: mol_type = other DNA
gctaggaaagcaagtggtcagg

SEQ ID NO: 2851 - DNA, 21 bp, Homo sapiens
  source 1..21: mol_type = other DNA
aaaaggaaaacctgactcagg

SEQ ID NO: 2852 - DNA, 23 bp, Homo sapiens
  source 1..23: mol_type = other DNA
aataggaaaaccagttagaccca

SEQ ID NO: 2853 - DNA, 23 bp, Homo sapiens
  source 1..23: mol_type = other DNA
actaggaaaacaagtggggaggg

SEQ ID NO: 2854 - DNA, 23 bp, Homo sapiens
  source 1..23: mol_type = other DNA
gactggaaaaacagtgattctga

SEQ ID NO: 2855 - DNA, 23 bp, Homo sapiens
  source 1..23: mol_type = other DNA
aatacgaaaagcagtcaggcgtg

SEQ ID NO: 2856 - DNA, 23 bp, Homo sapiens
  source 1..23: mol_type = other DNA
tagagaaaaacaagtaaataagg

SEQ ID NO: 2857 - DNA, 24 bp, Homo sapiens
  source 1..24: mol_type = other DNA
tataggaagagccagtttgtgagg

SEQ ID NO: 2858 - DNA, 21 bp, Homo sapiens
  source 1..21: mol_type = other DNA
tatagaaacccatgagtcaga

SEQ ID NO: 2859 - DNA, 21 bp, Homo sapiens
  source 1..21: mol_type = other DNA
tgtaaaaaccagggagacagg

SEQ ID NO: 2860 - DNA, 23 bp, Homo sapiens
  source 1..23: mol_type = other DNA
agtaggaagaccagtaagtaggc

SEQ ID NO: 2861 - DNA, 23 bp, Homo sapiens
  source 1..23: mol_type = other DNA
tataggaataccagtaagtgtgg

SEQ ID NO: 2862 - DNA, 22 bp, Homo sapiens
  source 1..22: mol_type = other DNA
tgtaggattccagtgagtcagg

SEQ ID NO: 2863 - DNA, 22 bp, Homo sapiens
  source 1..22: mol_type = other DNA
tatagagaaacagtgagtcaag

SEQ ID NO: 2864 - DNA, 22 bp, Homo sapiens
  source 1..22: mol_type = other DNA
aatagaaaaaccagaagtcagg

SEQ ID NO: 2865 - DNA, 23 bp, Homo sapiens
  source 1..23: mol_type = other DNA
aatagggaaaccagggagctggt

SEQ ID NO: 2866 - DNA, 22 bp, Homo sapiens
  source 1..22: mol_type = other DNA
tataagaaatcagtgagtgcag

SEQ ID NO: 2867 - DNA, 23 bp, Homo sapiens
  source 1..23: mol_type = other DNA
tatgagaaaaccagtgacctgga

SEQ ID NO: 2868 - DNA, 22 bp, Homo sapiens
  source 1..22: mol_type = other DNA
cataggataaccagaaatctgg

SEQ ID NO: 2869 - DNA, 23 bp, Homo sapiens
  source 1..23: mol_type = other DNA
agtagggaaaccagtgagtagac

SEQ ID NO: 2870 - DNA, 23 bp, Homo sapiens
  source 1..23: mol_type = other DNA
acaaggaaaaccagtaagtgtgg

SEQ ID NO: 2871 - DNA, 22 bp, Homo sapiens
  source 1..22: mol_type = other DNA
aatagtaaatccagtggtccgg

SEQ ID NO: 2872 - DNA, 22 bp, Homo sapiens
  source 1..22: mol_type = other DNA
tataagaaaccagtgagggctg

SEQ ID NO: 2873 - DNA, 23 bp, Homo sapiens
  source 1..23: mol_type = other DNA
tatagaaacaccagtgattctga

SEQ ID NO: 2874 - DNA, 22 bp, Homo sapiens
  source 1..22: mol_type = other DNA
aataagaaaccattgaatcagg

SEQ ID NO: 2875 - DNA, 23 bp, Homo sapiens
  source 1..23: mol_type = other DNA
gacaaggaaaccagtgagtctgg

SEQ ID NO: 2876 - DNA, 22 bp, Homo sapiens
  source 1..22: mol_type = other DNA
cttagcaaaaccaatgagcagg

SEQ ID NO: 2877 - DNA, 23 bp, Homo sapiens
  source 1..23: mol_type = other DNA
tgagaggaaaccagtgagtcaga

SEQ ID NO: 2878 - DNA, 23 bp, Homo sapiens
  source 1..23: mol_type = other DNA
acctggaaaaccagtgaggctgg

SEQ ID NO: 2879 - DNA, 23 bp, Homo sapiens
  source 1..23: mol_type = other DNA
aaaaggaaaaccagtgagggctg

SEQ ID NO: 2880 - DNA, 23 bp, Homo sapiens
  source 1..23: mol_type = other DNA
gaaataaaaaccagtgagttgga

SEQ ID NO: 2881 - DNA, 22 bp, Homo sapiens
  source 1..22: mol_type = other DNA
catagggaaaacaatgagcagg

SEQ ID NO: 2882 - DNA, 22 bp, Homo sapiens
  source 1..22: mol_type = other DNA
aataaggaaaccaggattcagg

SEQ ID NO: 2883 - DNA, 22 bp, Homo sapiens
  source 1..22: mol_type = other DNA
aataagaaaaacaggaatctgg

SEQ ID NO: 2884 - DNA, 23 bp, Homo sapiens
  source 1..23: mol_type = other DNA
tgaaggaaaaccagttagtaagg

SEQ ID NO: 2885 - DNA, 23 bp, Homo sapiens
  source 1..23: mol_type = other DNA
tgtggtaaaaccagtgagttgtg

SEQ ID NO: 2886 - DNA, 22 bp, Homo sapiens
  source 1..22: mol_type = other DNA
attaggaaaaccaggagagggg

SEQ ID NO: 2887 - DNA, 21 bp, Homo sapiens
  source 1..21: mol_type = other DNA
ggtaggaaaaccagagtaggg

SEQ ID NO: 2888 - DNA, 22 bp, Homo sapiens
  source 1..22: mol_type = other DNA
catatataaccagtgagtaggg

SEQ ID NO: 2889 - DNA, 22 bp, Homo sapiens
  source 1..22: mol_type = other DNA
taaggaaaaccactgactgggt

SEQ ID NO: 2890 - DNA, 23 bp, Homo sapiens
  source 1..23: mol_type = other DNA
tactagaaaaccagtgactaggc

SEQ ID NO: 2891 - DNA, 22 bp, Homo sapiens
  source 1..22: mol_type = other DNA
tttataaaaccactgagttagg

SEQ ID NO: 2892 - DNA, 22 bp, Homo sapiens
  source 1..22: mol_type = other DNA
gataggcaaaccatgagtaagg

SEQ ID NO: 2893 - DNA, 23 bp, Homo sapiens
  source 1..23: mol_type = other DNA
gacaagaaaaccagtgaggctgg

SEQ ID NO: 2894 - DNA, 21 bp, Homo sapiens
  source 1..21: mol_type = other DNA
gataggaaaatcagaatcagg

SEQ ID NO: 2895 - DNA, 23 bp, Homo sapiens
  source 1..23: mol_type = other DNA
aataaataaaccagtgagtgagt

SEQ ID NO: 2896 - DNA, 23 bp, Homo sapiens
  source 1..23: mol_type = other DNA
tatagggaaaccagtatgatagg

SEQ ID NO: 2897 - DNA, 23 bp, Homo sapiens
  source 1..23: mol_type = other DNA
tacaagaaaaccagtgagtcaaa

SEQ ID NO: 2898 - DNA, 24 bp, Homo sapiens
  source 1..24: mol_type = other DNA
aataggagaaacaggtgagtaagg

SEQ ID NO: 2899 - DNA, 22 bp, Homo sapiens
  source 1..22: mol_type = other DNA
ttttagaaaaccatgagtccag

SEQ ID NO: 2900 - DNA, 21 bp, Homo sapiens
  source 1..21: mol_type = other DNA
tataggaaatagtgagtcctg

SEQ ID NO: 2901 - DNA, 23 bp, Homo sapiens
  source 1..23: mol_type = other DNA
tataagaaaaccagtcagaatgg

SEQ ID NO: 2902 - DNA, 24 bp, Homo sapiens
  source 1..24: mol_type = other DNA
gaaaggaaaaccagatgagtttgg

SEQ ID NO: 2903 - DNA, 22 bp, Homo sapiens
  source 1..22: mol_type = other DNA
tattggaaaacagtgagactgg

SEQ ID NO: 2904 - DNA, 22 bp, Homo sapiens
  source 1..22: mol_type = other DNA
tatagtataaacagtaagcagg

SEQ ID NO: 2905 - DNA, 23 bp, Homo sapiens
  source 1..23: mol_type = other DNA
tataggtaaacctgtgtcatggg

SEQ ID NO: 2906 - DNA, 23 bp, Homo sapiens
  source 1..23: mol_type = other DNA
gtaaggaaagccagtgtgtctgg

SEQ ID NO: 2907 - DNA, 23 bp, Homo sapiens
  source 1..23: mol_type = other DNA
gataagataaccagttagtgggt

SEQ ID NO: 2908 - DNA, 22 bp, Homo sapiens
  source 1..22: mol_type = other DNA
tgcaggaaaaccaatgatcaga

SEQ ID NO: 2909 - DNA, 23 bp, Homo sapiens
  source 1..23: mol_type = other DNA
tatagaaaaaccatgaaagcagg

SEQ ID NO: 2910 - DNA, 22 bp, Homo sapiens
  source 1..22: mol_type = other DNA
aatatgaaaaccagttataggg

SEQ ID NO: 2911 - DNA, 21 bp, Homo sapiens
  source 1..21: mol_type = other DNA
gattagaaaaccagagtcagg

SEQ ID NO: 2912 - DNA, 23 bp, Homo sapiens
  source 1..23: mol_type = other DNA
tttatgaaaaccagtaagtctgc

SEQ ID NO: 2913 - DNA, 23 bp, Homo sapiens
  source 1..23: mol_type = other DNA
gataggaaaaccagttaggaggc

SEQ ID NO: 2914 - DNA, 22 bp, Homo sapiens
  source 1..22: mol_type = other DNA
tatagtaaactagtgggtaggg

SEQ ID NO: 2915 - DNA, 23 bp, Homo sapiens
  source 1..23: mol_type = other DNA
ggaaacaaaaccagtgagtcggt

SEQ ID NO: 2916 - DNA, 22 bp, Homo sapiens
  source 1..22: mol_type = other DNA
aatttgaaaaccagtgatcaag

SEQ ID NO: 2917 - DNA, 22 bp, Homo sapiens
  source 1..22: mol_type = other DNA
aagaggagaaccattgatcggg

SEQ ID NO: 2918 - DNA, 24 bp, Homo sapiens
  source 1..24: mol_type = other DNA
aggaggaaaaccagtagagtgtgg

SEQ ID NO: 2919 - DNA, 23 bp, Homo sapiens
  source 1..23: mol_type = other DNA
ggcgggaaaaccagcgagtccag

SEQ ID NO: 2920 - DNA, 23 bp, Homo sapiens
  source 1..23: mol_type = other DNA
tggaggaaggccagtgagtcagg

SEQ ID NO: 2921 - DNA, 24 bp, Homo sapiens
  source 1..24: mol_type = other DNA
gataggaaaaacaagaaagtcagg

SEQ ID NO: 2922 - DNA, 23 bp, Homo sapiens
  source 1..23: mol_type = other DNA
gatacggaaaccacggagtcggg

SEQ ID NO: 2923 - DNA, 22 bp, Homo sapiens
  source 1..22: mol_type = other DNA
tattctaaaccagtaagtctgg

SEQ ID NO: 2924 - DNA, 22 bp, Homo sapiens
  source 1..22: mol_type = other DNA
gataggaattcagtgagtctgc

SEQ ID NO: 2925 - DNA, 21 bp, Homo sapiens
  source 1..21: mol_type = other DNA
gttaggaaagccagtgtctgg

SEQ ID NO: 2926 - DNA, 23 bp, Homo sapiens
  source 1..23: mol_type = other DNA
tatagaacaaacagtgattcagg

SEQ ID NO: 2927 - DNA, 21 bp, Homo sapiens
  source 1..21: mol_type = other DNA
ttttggtaacagtgagtcagg

SEQ ID NO: 2928 - DNA, 23 bp, Homo sapiens
  source 1..23: mol_type = other DNA
tgaaggaaaaccagtaagcagag

SEQ ID NO: 2929 - DNA, 24 bp, Homo sapiens
  source 1..24: mol_type = other DNA
tatagcaaaaccactgttgtatgg

SEQ ID NO: 2930 - DNA, 22 bp, Homo sapiens
  source 1..22: mol_type = other DNA
taaggcaaaccactgagtcttt

SEQ ID NO: 2931 - DNA, 23 bp, Homo sapiens
  source 1..23: mol_type = other DNA
aatagaaaaagcattgaatcagg

SEQ ID NO: 2932 - DNA, 23 bp, Homo sapiens
  source 1..23: mol_type = other DNA
tcttggaaaaccagaaggtctgg

SEQ ID NO: 2933 - DNA, 23 bp, Homo sapiens
  source 1..23: mol_type = other DNA
aatagcaagaccagaaagtctgg

SEQ ID NO: 2934 - DNA, 22 bp, Homo sapiens
  source 1..22: mol_type = other DNA
aataggaaaccctggagtcagg

SEQ ID NO: 2935 - DNA, 23 bp, Homo sapiens
  source 1..23: mol_type = other DNA
taaaggaaaacctgggactcagt

SEQ ID NO: 2936 - DNA, 23 bp, Homo sapiens
  source 1..23: mol_type = other DNA
tataggaaaaacactgtttccag

SEQ ID NO: 2937 - DNA, 23 bp, Homo sapiens
  source 1..23: mol_type = other DNA
tatagtagtactagtgagttctg

SEQ ID NO: 2938 - DNA, 23 bp, Homo sapiens
  source 1..23: mol_type = other DNA
ccaagtaaaaccagtgattctgc

SEQ ID NO: 2939 - DNA, 23 bp, Homo sapiens
  source 1..23: mol_type = other DNA
aaatggtaaaccagtgagccgtg

SEQ ID NO: 2940 - DNA, 23 bp, Homo sapiens
  source 1..23: mol_type = other DNA
aataggaataccattgaatctat

SEQ ID NO: 2941 - DNA, 24 bp, Homo sapiens
  source 1..24: mol_type = other DNA
tatgggaaagccaagagagccggg

SEQ ID NO: 2942 - DNA, 22 bp, Homo sapiens
  source 1..22: mol_type = other DNA
tataagaaaccagagaggcttg

SEQ ID NO: 2943 - DNA, 22 bp, Homo sapiens
  source 1..22: mol_type = other DNA
caaagaaaaaccatgagtcatg

SEQ ID NO: 2944 - DNA, 23 bp, Homo sapiens
  source 1..23: mol_type = other DNA
ttttagaaaaacagtgagtcaaa

SEQ ID NO: 2945 - DNA, 23 bp, Homo sapiens
  source 1..23: mol_type = other DNA
gactggaacaccagtgagacaga

SEQ ID NO: 2946 - DNA, 22 bp, Homo sapiens
  source 1..22: mol_type = other DNA
tatagcaaaccatgaagtcagg

SEQ ID NO: 2947 - DNA, 22 bp, Homo sapiens
  source 1..22: mol_type = other DNA
taaaggaaaaccatgactatgg

SEQ ID NO: 2948 - DNA, 23 bp, Homo sapiens
  source 1..23: mol_type = other DNA
aaaaacaaaaccagtgagctagg

SEQ ID NO: 2949 - DNA, 23 bp, Homo sapiens
  source 1..23: mol_type = other DNA
tataggaatgcctgtgatttttg

SEQ ID NO: 2950 - DNA, 23 bp, Homo sapiens
  source 1..23: mol_type = other DNA
tagaggaaaaccagacattatag

SEQ ID NO: 2951 - DNA, 23 bp, Homo sapiens
  source 1..23: mol_type = other DNA
taaaggaaaaacactcagtatga

SEQ ID NO: 2952 - DNA, 23 bp, Homo sapiens
  source 1..23: mol_type = other DNA
tatatttaaagccatgagtcagg

SEQ ID NO: 2953 - DNA, 23 bp, Homo sapiens
  source 1..23: mol_type = other DNA
tctagggaaaccagtagagcagg

SEQ ID NO: 2954 - DNA, 22 bp, Homo sapiens
  source 1..22: mol_type = other DNA
tacagcaaaagcagtactcagg

SEQ ID NO: 2955 - DNA, 22 bp, Homo sapiens
  source 1..22: mol_type = other DNA
tattgaaagaccagtgatcatg

SEQ ID NO: 2956 - DNA, 22 bp, Homo sapiens
  source 1..22: mol_type = other DNA
tataggaaaacagagtgtcagc

SEQ ID NO: 2957 - DNA, 22 bp, Homo sapiens
  source 1..22: mol_type = other DNA
gatagaaacaccatgaatcagg

SEQ ID NO: 2958 - DNA, 22 bp, Homo sapiens
  source 1..22: mol_type = other DNA
tatatgaaaccagtaagtttgg

SEQ ID NO: 2959 - DNA, 22 bp, Homo sapiens
  source 1..22: mol_type = other DNA
aataagaaaaccagaaatcagg

SEQ ID NO: 2960 - DNA, 22 bp, Homo sapiens
  source 1..22: mol_type = other DNA
tggaggaaaccagtaagtctga

SEQ ID NO: 2961 - DNA, 22 bp, Homo sapiens
  source 1..22: mol_type = other DNA
aataggcaaccaatgagtcaag

SEQ ID NO: 2962 - DNA, 23 bp, Homo sapiens
  source 1..23: mol_type = other DNA
cataggaaaacaagtaattctgg

SEQ ID NO: 2963 - DNA, 22 bp, Homo sapiens
  source 1..22: mol_type = other DNA
tgtagggaacctttgagtcagg

SEQ ID NO: 2964 - DNA, 23 bp, Homo sapiens
  source 1..23: mol_type = other DNA
cctaggaaaaccagtgatgtggt

SEQ ID NO: 2965 - DNA, 22 bp, Homo sapiens
  source 1..22: mol_type = other DNA
agtaggaaagcctgtgatcagg

SEQ ID NO: 2966 - DNA, 23 bp, Homo sapiens
  source 1..23: mol_type = other DNA
attaagaaagccagtgagctggg

SEQ ID NO: 2967 - DNA, 22 bp, Homo sapiens
  source 1..22: mol_type = other DNA
ttatggaaaaccatgtgtcagg

SEQ ID NO: 2968 - DNA, 22 bp, Homo sapiens
  source 1..22: mol_type = other DNA
aatagtcaaccagtgagtgtgg

SEQ ID NO: 2969 - DNA, 22 bp, Homo sapiens
  source 1..22: mol_type = other DNA
tataagtaaccagtgaatcatg

SEQ ID NO: 2970 - DNA, 23 bp, Homo sapiens
  source 1..23: mol_type = other DNA
ctgaggaaaagcagtgagtcagg

SEQ ID NO: 2971 - DNA, 22 bp, Homo sapiens
  source 1..22: mol_type = other DNA
tatagtagaaccaggaatccag

SEQ ID NO: 2972 - DNA, 23 bp, Homo sapiens
  source 1..23: mol_type = other DNA
tataggaaatgcagagagtctgg

SEQ ID NO: 2973 - DNA, 24 bp, Homo sapiens
  source 1..24: mol_type = other DNA
ggtaggaagatcagtgagctcagg

SEQ ID NO: 2974 - DNA, 23 bp, Homo sapiens
  source 1..23: mol_type = other DNA
tgcattaaaaccagtgattcaga

SEQ ID NO: 2975 - DNA, 22 bp, Homo sapiens
  source 1..22: mol_type = other DNA
tatataaatccagtgagtgggg

SEQ ID NO: 2976 - DNA, 22 bp, Homo sapiens
  source 1..22: mol_type = other DNA
ggtatgaataccaggagtcagg

SEQ ID NO: 2977 - DNA, 22 bp, Homo sapiens
  source 1..22: mol_type = other DNA
cataggaaaaccaatgttgtgg

SEQ ID NO: 2978 - DNA, 23 bp, Homo sapiens
  source 1..23: mol_type = other DNA
tgtagtgaaaccagtgaattgag

SEQ ID NO: 2979 - DNA, 23 bp, Homo sapiens
  source 1..23: mol_type = other DNA
aagaggaaaaccagagagtcagt

SEQ ID NO: 2980 - DNA, 24 bp, Homo sapiens
  source 1..24: mol_type = other DNA
agtaggagaaacaagtgagtcaag

SEQ ID NO: 2981 - DNA, 23 bp, Homo sapiens
  source 1..23: mol_type = other DNA
tatagtacaaccagtgaggccag

SEQ ID NO: 2982 - DNA, 22 bp, Homo sapiens
  source 1..22: mol_type = other DNA
cataaaataccagtgagtcaag

SEQ ID NO: 2983 - DNA, 22 bp, Homo sapiens
  source 1..22: mol_type = other DNA
tatagagaactactgagtcgag

SEQ ID NO: 2984 - DNA, 23 bp, Homo sapiens
  source 1..23: mol_type = other DNA
tgtaggtaaaccaaataatctgg

SEQ ID NO: 2985 - DNA, 23 bp, Homo sapiens
  source 1..23: mol_type = other DNA
taaggaaaagccagtgagtagga

SEQ ID NO: 2986 - DNA, 23 bp, Homo sapiens
  source 1..23: mol_type = other DNA
aatccaaaaaccagtgagttagg

SEQ ID NO: 2987 - DNA, 23 bp, Homo sapiens
  source 1..23: mol_type = other DNA
aataggaataccactgtttcagg

SEQ ID NO: 2988 - DNA, 23 bp, Homo sapiens
  source 1..23: mol_type = other DNA
gccatgtaaaccagtgagtctgt

SEQ ID NO: 2989 - DNA, 23 bp, Homo sapiens
  source 1..23: mol_type = other DNA
aataggaatacaagtaagtacag

SEQ ID NO: 2990 - DNA, 23 bp, Homo sapiens
  source 1..23: mol_type = other DNA
aataggaagaccaatgacagggg

SEQ ID NO: 2991 - DNA, 23 bp, Homo sapiens
  source 1..23: mol_type = other DNA
aatagagaaacaaatgagtctgg

SEQ ID NO: 2992 - DNA, 23 bp, Homo sapiens
  source 1..23: mol_type = other DNA
tataggaaaatcagtgaaagtag

SEQ ID NO: 2993 - DNA, 24 bp, Homo sapiens
  source 1..24: mol_type = other DNA
tataggtgagaccagtgagtttgg

SEQ ID NO: 2994 - DNA, 23 bp, Homo sapiens
  source 1..23: mol_type = other DNA
tcaaaataaaccagtgagttagg

SEQ ID NO: 2995 - DNA, 22 bp, Homo sapiens
  source 1..22: mol_type = other DNA
tattgaaaaccagtgagtgtga

SEQ ID NO: 2996 - DNA, 23 bp, Homo sapiens
  source 1..23: mol_type = other DNA
tatatgaaaaccaaggagcagga

SEQ ID NO: 2997 - DNA, 22 bp, Homo sapiens
  source 1..22: mol_type = other DNA
aatcggaaaaccagtgatctgc

SEQ ID NO: 2998 - DNA, 23 bp, Homo sapiens
  source 1..23: mol_type = other DNA
tttaaaacaaccaatgagtctga

SEQ ID NO: 2999 - DNA, 22 bp, Homo sapiens
  source 1..22: mol_type = other DNA
aataggaaaatcagaagacagg

SEQ ID NO: 3000 - DNA, 21 bp, Homo sapiens
  source 1..21: mol_type = other DNA
aataggtataccagtgtctgg

SEQ ID NO: 3001 - DNA, 23 bp, Homo sapiens
  source 1..23: mol_type = other DNA
gctgtgaaaaccagagagtctcg

SEQ ID NO: 3002 - DNA, 23 bp, Homo sapiens
  source 1..23: mol_type = other DNA
caaaagaaaaccagtgatgtggg

SEQ ID NO: 3003 - DNA, 23 bp, Homo sapiens
  source 1..23: mol_type = other DNA
tgtggtaacaccagtgagtcagg

SEQ ID NO: 3004 - DNA, 23 bp, Homo sapiens
  source 1..23: mol_type = other DNA
aacatgaaaaccagtaagtcagc

SEQ ID NO: 3005 - DNA, 22 bp, Homo sapiens
  source 1..22: mol_type = other DNA
aagatgaaaaccagtggcctgg

SEQ ID NO: 3006 - DNA, 23 bp, Homo sapiens
  source 1..23: mol_type = other DNA
tgattgaaaaccactgagtaagg

SEQ ID NO: 3007 - DNA, 22 bp, Homo sapiens
  source 1..22: mol_type = other DNA
tactagaaaacagtgagtcatg

SEQ ID NO: 3008 - DNA, 23 bp, Homo sapiens
  source 1..23: mol_type = other DNA
catagtggaaccagtgagtcact

SEQ ID NO: 3009 - DNA, 22 bp, Homo sapiens
  source 1..22: mol_type = other DNA
gataagaaacaagtgagccagg

SEQ ID NO: 3010 - DNA, 23 bp, Homo sapiens
  source 1..23: mol_type = other DNA
aataggaatagcattgaatctgt

SEQ ID NO: 3011 - DNA, 23 bp, Homo sapiens
  source 1..23: mol_type = other DNA
agtaggaaaaccaatgaatctca

SEQ ID NO: 3012 - DNA, 22 bp, Homo sapiens
  source 1..22: mol_type = other DNA
tatatgaaagccagtggtatgg

SEQ ID NO: 3013 - DNA, 23 bp, Homo sapiens
  source 1..23: mol_type = other DNA
tttaggagtaggagtgagccagg

SEQ ID NO: 3014 - DNA, 23 bp, Homo sapiens
  source 1..23: mol_type = other DNA
gagaggaaaagtagtgagttagg

SEQ ID NO: 3015 - DNA, 23 bp, Homo sapiens
  source 1..23: mol_type = other DNA
aatgttaaaaccactgagactgg

SEQ ID NO: 3016 - DNA, 23 bp, Homo sapiens
  source 1..23: mol_type = other DNA
gaaaacaaaaccagtgaggcagg

SEQ ID NO: 3017 - DNA, 23 bp, Homo sapiens
  source 1..23: mol_type = other DNA
tataggaatactagtaagtcatc

SEQ ID NO: 3018 - DNA, 21 bp, Homo sapiens
  source 1..21: mol_type = other DNA
cattgaaaccagtgggtctgg

SEQ ID NO: 3019 - DNA, 23 bp, Homo sapiens
  source 1..23: mol_type = other DNA
tatatgaataccagtgagcgatt

SEQ ID NO: 3020 - DNA, 23 bp, Homo sapiens
  source 1..23: mol_type = other DNA
tataataaaacccttgagttagg

SEQ ID NO: 3021 - DNA, 23 bp, Homo sapiens
  source 1..23: mol_type = other DNA
tataagaaaaccactgaatggta

SEQ ID NO: 3022 - DNA, 23 bp, Homo sapiens
  source 1..23: mol_type = other DNA
gagtgacaaaccagtgactcagg

SEQ ID NO: 3023 - DNA, 23 bp, Homo sapiens
  source 1..23: mol_type = other DNA
tggaaagaaaccagtgagacagg

SEQ ID NO: 3024 - DNA, 22 bp, Homo sapiens
  source 1..22: mol_type = other DNA
aatagaaatccaatgagtttgg

SEQ ID NO: 3025 - DNA, 22 bp, Homo sapiens
  source 1..22: mol_type = other DNA
gatgtaacaccagtgagtgagg

SEQ ID NO: 3026 - DNA, 21 bp, Homo sapiens
  source 1..21: mol_type = other DNA
aataggtaaaccagagttggg

SEQ ID NO: 3027 - DNA, 23 bp, Homo sapiens
  source 1..23: mol_type = other DNA
tagagaaaaaccagtgaaactaa

SEQ ID NO: 3028 - DNA, 23 bp, Homo sapiens
  source 1..23: mol_type = other DNA
tatagaaaaacagtggagactgg

SEQ ID NO: 3029 - DNA, 23 bp, Homo sapiens
  source 1..23: mol_type = other DNA
tataggatacacagtgattaaga

SEQ ID NO: 3030 - DNA, 23 bp, Homo sapiens
  source 1..23: mol_type = other DNA
tatagggaaaaaaatgagtttgg

SEQ ID NO: 3031 - DNA, 23 bp, Homo sapiens
  source 1..23: mol_type = other DNA
tagaggaaaagaagagagtcagg

SEQ ID NO: 3032 - DNA, 23 bp, Homo sapiens
  source 1..23: mol_type = other DNA
tatagaaaaaccaaagaatatgt

SEQ ID NO: 3033 - DNA, 22 bp, Homo sapiens
  source 1..22: mol_type = other DNA
cacaagaatacagtgagtcagg

SEQ ID NO: 3034 - DNA, 22 bp, Homo sapiens
  source 1..22: mol_type = other DNA
aagaggaaagccagtggtgtgg

SEQ ID NO: 3035 - DNA, 21 bp, Homo sapiens
  source 1..21: mol_type = other DNA
cataggaaaacgtgtgtcatg

SEQ ID NO: 3036 - DNA, 22 bp, Homo sapiens
  source 1..22: mol_type = other DNA
tatagcaaaagcagtagtctag

SEQ ID NO: 3037 - DNA, 23 bp, Homo sapiens
  source 1..23: mol_type = other DNA
gataggaatagcattgaatctgc

SEQ ID NO: 3038 - DNA, 23 bp, Homo sapiens
  source 1..23: mol_type = other DNA
tgtagcaacaccagagaggcaga

SEQ ID NO: 3039 - DNA, 23 bp, Homo sapiens
  source 1..23: mol_type = other DNA
tttttaaaaaccagtgattcaga

SEQ ID NO: 3040 - DNA, 22 bp, Homo sapiens
  source 1..22: mol_type = other DNA
tatagaaaaacagtgaaagggg

SEQ ID NO: 3041 - DNA, 21 bp, Homo sapiens
  source 1..21: mol_type = other DNA
tataggaaccagcaattcagg

SEQ ID NO: 3042 - DNA, 22 bp, Homo sapiens
  source 1..22: mol_type = other DNA
cataggataaccagtggtgaga

SEQ ID NO: 3043 - DNA, 22 bp, Homo sapiens
  source 1..22: mol_type = other DNA
gatagtaaaccagtgagtaggc

SEQ ID NO: 3044 - DNA, 23 bp, Homo sapiens
  source 1..23: mol_type = other DNA
aatacggaaaaccatgagtctgg

SEQ ID NO: 3045 - DNA, 23 bp, Homo sapiens
  source 1..23: mol_type = other DNA
aatagtgaaaccagtgagcctgg

SEQ ID NO: 3046 - DNA, 23 bp, Homo sapiens
  source 1..23: mol_type = other DNA
gataggaaatccagtaagtaggg

SEQ ID NO: 3047 - DNA, 23 bp, Homo sapiens
  source 1..23: mol_type = other DNA
taaaggaaaaccagtgggtctgg

SEQ ID NO: 3048 - DNA, 24 bp, Homo sapiens
  source 1..24: mol_type = other DNA
tataggagaaaacagtgattctgg

SEQ ID NO: 3049 - DNA, 23 bp, Homo sapiens
  source 1..23: mol_type = other DNA
gacaaggaaaccagtgagtctag

SEQ ID NO: 3050 - DNA, 22 bp, Homo sapiens
  source 1..22: mol_type = other DNA
aatagggaaaccaggaataagg

SEQ ID NO: 3051 - DNA, 22 bp, Homo sapiens
  source 1..22: mol_type = other DNA
gatagaataccagtgagctggg

SEQ ID NO: 3052 - DNA, 22 bp, Homo sapiens
  source 1..22: mol_type = other DNA
gataggaaaacagagagacagg

SEQ ID NO: 3053 - DNA, 22 bp, Homo sapiens
  source 1..22: mol_type = other DNA
aggaggaaaatcaggagtctgg

SEQ ID NO: 3054 - DNA, 22 bp, Homo sapiens
  source 1..22: mol_type = other DNA
tataagaaaaccatgagaaagg

SEQ ID NO: 3055 - DNA, 23 bp, Homo sapiens
  source 1..23: mol_type = other DNA
tcaagggaaaccagtgagtggga

SEQ ID NO: 3056 - DNA, 22 bp, Homo sapiens
  source 1..22: mol_type = other DNA
tggaggaaaccagagaatcagg

SEQ ID NO: 3057 - DNA, 23 bp, Homo sapiens
  source 1..23: mol_type = other DNA
agtaggagaaccagagatgcagg

SEQ ID NO: 3058 - DNA, 23 bp, Homo sapiens
  source 1..23: mol_type = other DNA
ttgggggaaaccagtgagccagg

SEQ ID NO: 3059 - DNA, 23 bp, Homo sapiens
  source 1..23: mol_type = other DNA
aaaatgtaaaccagtgagtgtgg

SEQ ID NO: 3060 - DNA, 22 bp, Homo sapiens
  source 1..22: mol_type = other DNA
gaaaagaaaaccagtaatctgg

SEQ ID NO: 3061 - DNA, 23 bp, Homo sapiens
  source 1..23: mol_type = other DNA
tataggaaacacagtgactcagt

SEQ ID NO: 3062 - DNA, 22 bp, Homo sapiens
  source 1..22: mol_type = other DNA
gatagaaaaatcagtaatcagg

SEQ ID NO: 3063 - DNA, 23 bp, Homo sapiens
  source 1..23: mol_type = other DNA
aaaatgaaaatcagtgagtgggt

SEQ ID NO: 3064 - DNA, 23 bp, Homo sapiens
  source 1..23: mol_type = other DNA
gataggaaaaacagagagtgaga

SEQ ID NO: 3065 - DNA, 22 bp, Homo sapiens
  source 1..22: mol_type = other DNA
ccttggaaaaccagtggtgggg

SEQ ID NO: 3066 - DNA, 22 bp, Homo sapiens
  source 1..22: mol_type = other DNA
aataggataacaatgaatcagg

SEQ ID NO: 3067 - DNA, 22 bp, Homo sapiens
  source 1..22: mol_type = other DNA
tatagtataaccataagtctga

SEQ ID NO: 3068 - DNA, 22 bp, Homo sapiens
  source 1..22: mol_type = other DNA
tagtggaaaaccatgagtctag

SEQ ID NO: 3069 - DNA, 23 bp, Homo sapiens
  source 1..23: mol_type = other DNA
aataggaaaatcagtgggccagg

SEQ ID NO: 3070 - DNA, 23 bp, Homo sapiens
  source 1..23: mol_type = other DNA
ttaaggaataccaatgagcctgg

SEQ ID NO: 3071 - DNA, 23 bp, Homo sapiens
  source 1..23: mol_type = other DNA
tagaacaaaaccagtgatccaga

SEQ ID NO: 3072 - DNA, 23 bp, Homo sapiens
  source 1..23: mol_type = other DNA
tacagaaaaaccagagagtgggt

SEQ ID NO: 3073 - DNA, 23 bp, Homo sapiens
  source 1..23: mol_type = other DNA
tactggagaaccaatgagtagga

SEQ ID NO: 3074 - DNA, 23 bp, Homo sapiens
  source 1..23: mol_type = other DNA
ctctggaaaaccagtgagtcctt

SEQ ID NO: 3075 - DNA, 23 bp, Homo sapiens
  source 1..23: mol_type = other DNA
tattgataaaacagtgagttggc

SEQ ID NO: 3076 - DNA, 22 bp, Homo sapiens
  source 1..22: mol_type = other DNA
tttagattaccagtgagtttgg

SEQ ID NO: 3077 - DNA, 22 bp, Homo sapiens
  source 1..22: mol_type = other DNA
cataggacacaagtgagttggg

SEQ ID NO: 3078 - DNA, 22 bp, Homo sapiens
  source 1..22: mol_type = other DNA
cataggaaactcagtgaactgg

SEQ ID NO: 3079 - DNA, 22 bp, Homo sapiens
  source 1..22: mol_type = other DNA
tataggagaccagtgaagcaag

SEQ ID NO: 3080 - DNA, 22 bp, Homo sapiens
  source 1..22: mol_type = other DNA
tatggaaaaccagtgtgtggcc

SEQ ID NO: 3081 - DNA, 22 bp, Homo sapiens
  source 1..22: mol_type = other DNA
aatagtaatccagtgtgtctgg

SEQ ID NO: 3082 - DNA, 23 bp, Homo sapiens
  source 1..23: mol_type = other DNA
ctcaggaaaagcagtgactcagg

SEQ ID NO: 3083 - DNA, 22 bp, Homo sapiens
  source 1..22: mol_type = other DNA
gataggaaaaccatgaaggagg

SEQ ID NO: 3084 - DNA, 23 bp, Homo sapiens
  source 1..23: mol_type = other DNA
tgtaagaaaacctgagagcctgg

SEQ ID NO: 3085 - DNA, 23 bp, Homo sapiens
  source 1..23: mol_type = other DNA
tctttaaaaaccagtgagtcttt

SEQ ID NO: 3086 - DNA, 23 bp, Homo sapiens
  source 1..23: mol_type = other DNA
attaggaaaaccagttaggaggc

SEQ ID NO: 3087 - DNA, 23 bp, Homo sapiens
  source 1..23: mol_type = other DNA
tataggaaaaacagggactcgga

SEQ ID NO: 3088 - DNA, 22 bp, Homo sapiens
  source 1..22: mol_type = other DNA
tatggaaccccagtgagtctga

SEQ ID NO: 3089 - DNA, 22 bp, Homo sapiens
  source 1..22: mol_type = other DNA
catatgaaaatcaggaatcagg

SEQ ID NO: 3090 - DNA, 21 bp, Homo sapiens
  source 1..21: mol_type = other DNA
tataggaaagccacagtcagg

SEQ ID NO: 3091 - DNA, 22 bp, Homo sapiens
  source 1..22: mol_type = other DNA
gacaggaacaccaggagtcagg

SEQ ID NO: 3092 - DNA, 23 bp, Homo sapiens
  source 1..23: mol_type = other DNA
tggaggaaaactagagagttctg

SEQ ID NO: 3093 - DNA, 22 bp, Homo sapiens
  source 1..22: mol_type = other DNA
tcaaggaaaaacaggagtcagg

SEQ ID NO: 3094 - DNA, 23 bp, Homo sapiens
  source 1..23: mol_type = other DNA
ggcagggaaaccagtgagacagg

SEQ ID NO: 3095 - DNA, 23 bp, Homo sapiens
  source 1..23: mol_type = other DNA
tggagaaaaaccagtgaatgtgg

SEQ ID NO: 3096 - DNA, 23 bp, Homo sapiens
  source 1..23: mol_type = other DNA
gctactagaaccagtgagtcaga

SEQ ID NO: 3097 - DNA, 23 bp, Homo sapiens
  source 1..23: mol_type = other DNA
aatatgaaaaccagtgatggtag

SEQ ID NO: 3098 - DNA, 23 bp, Homo sapiens
  source 1..23: mol_type = other DNA
cctaagcaaaccagtgagatagg

SEQ ID NO: 3099 - DNA, 23 bp, Homo sapiens
  source 1..23: mol_type = other DNA
tataataagaccagtgagcatgg

SEQ ID NO: 3100 - DNA, 23 bp, Homo sapiens
  source 1..23: mol_type = other DNA
tatggaatatccagtgagtccga

SEQ ID NO: 3101 - DNA, 23 bp, Homo sapiens
  source 1..23: mol_type = other DNA
gagaggaaaaccagagactggag

SEQ ID NO: 3102 - DNA, 23 bp, Homo sapiens
  source 1..23: mol_type = other DNA
tagagaaacaacagtgagtccag

SEQ ID NO: 3103 - DNA, 23 bp, Homo sapiens
  source 1..23: mol_type = other DNA
gataggaagaccagtgtatctgc

SEQ ID NO: 3104 - DNA, 23 bp, Homo sapiens
  source 1..23: mol_type = other DNA
ggtagcaaaactagtaagcctgg

SEQ ID NO: 3105 - DNA, 23 bp, Homo sapiens
  source 1..23: mol_type = other DNA
tataggcaacacagtgaatatgg

SEQ ID NO: 3106 - DNA, 23 bp, Homo sapiens
  source 1..23: mol_type = other DNA
tataagcaaaccagggagtgagc

SEQ ID NO: 3107 - DNA, 22 bp, Homo sapiens
  source 1..22: mol_type = other DNA
cataggaaaacagtgagaaagt

SEQ ID NO: 3108 - DNA, 22 bp, Homo sapiens
  source 1..22: mol_type = other DNA
tataagaaaaccagtagtcact

SEQ ID NO: 3109 - DNA, 21 bp, Homo sapiens
  source 1..21: mol_type = other DNA
tcaaggaaaaccagtgacagt

SEQ ID NO: 3110 - DNA, 22 bp, Homo sapiens
  source 1..22: mol_type = other DNA
tacaataaaaccagggatctgg

SEQ ID NO: 3111 - DNA, 23 bp, Homo sapiens
  source 1..23: mol_type = other DNA
gatgggaaaaactgagagtgggg

SEQ ID NO: 3112 - DNA, 23 bp, Homo sapiens
  source 1..23: mol_type = other DNA
tagagaaaaaccagttaataggc

SEQ ID NO: 3113 - DNA, 23 bp, Homo sapiens
  source 1..23: mol_type = other DNA
agtacggaaaccaggtagtctgg

SEQ ID NO: 3114 - DNA, 21 bp, Homo sapiens
  source 1..21: mol_type = other DNA
taaaggaaaacctgagactgg

SEQ ID NO: 3115 - DNA, 22 bp, Homo sapiens
  source 1..22: mol_type = other DNA
gataggaaacccagaggccggg

SEQ ID NO: 3116 - DNA, 23 bp, Homo sapiens
  source 1..23: mol_type = other DNA
cataggaaatccagtgaaagaga

SEQ ID NO: 3117 - DNA, 23 bp, Homo sapiens
  source 1..23: mol_type = other DNA
tataggaaaaacagtaatagagt

SEQ ID NO: 3118 - DNA, 23 bp, Homo sapiens
  source 1..23: mol_type = other DNA
aatagaaaaaccagtaggtatga

SEQ ID NO: 3119 - DNA, 23 bp, Homo sapiens
  source 1..23: mol_type = other DNA
tatagaaaaaccagagtcaatgg

SEQ ID NO: 3120 - DNA, 23 bp, Homo sapiens
  source 1..23: mol_type = other DNA
gttggaaaaagcagggagtcagg

SEQ ID NO: 3121 - DNA, 23 bp, Homo sapiens
  source 1..23: mol_type = other DNA
aaaaggaaaaccactgagaaggc

SEQ ID NO: 3122 - DNA, 23 bp, Homo sapiens
  source 1..23: mol_type = other DNA
aatatgtaaactaatgagtgtgg

SEQ ID NO: 3123 - DNA, 23 bp, Homo sapiens
  source 1..23: mol_type = other DNA
catgggtaacccagtgagtctgg

SEQ ID NO: 3124 - DNA, 23 bp, Homo sapiens
  source 1..23: mol_type = other DNA
tgtaggaaggtcagtgtgtaggg

SEQ ID NO: 3125 - DNA, 22 bp, Homo sapiens
  source 1..22: mol_type = other DNA
cataggaaaagcagtattcgtg

SEQ ID NO: 3126 - DNA, 22 bp, Homo sapiens
  source 1..22: mol_type = other DNA
aataggaaaaccagttatcaca

SEQ ID NO: 3127 - DNA, 23 bp, Homo sapiens
  source 1..23: mol_type = other DNA
cgtggaaaaaccagtgagaatgg

SEQ ID NO: 3128 - DNA, 23 bp, Homo sapiens
  source 1..23: mol_type = other DNA
taaaggaaaacaagtgaatttaa

SEQ ID NO: 3129 - DNA, 24 bp, Homo sapiens
  source 1..24: mol_type = other DNA
taaaggatgaccagtggagtcaag

SEQ ID NO: 3130 - DNA, 22 bp, Homo sapiens
  source 1..22: mol_type = other DNA
tatgggaaaacagtgtgttggt

SEQ ID NO: 3131 - DNA, 21 bp, Homo sapiens
  source 1..21: mol_type = other DNA
taaaggaaaacctgaaactgg

SEQ ID NO: 3132 - DNA, 22 bp, Homo sapiens
  source 1..22: mol_type = other DNA
tctgggagaaccaggtgtcggg

SEQ ID NO: 3133 - DNA, 23 bp, Homo sapiens
  source 1..23: mol_type = other DNA
taaaggaaaaccagtagagctcg

SEQ ID NO: 3134 - DNA, 23 bp, Homo sapiens
  source 1..23: mol_type = other DNA
tatccataatccaatgagtcagg

SEQ ID NO: 3135 - DNA, 23 bp, Homo sapiens
  source 1..23: mol_type = other DNA
cagaggaaaaccagtgtggcgat

SEQ ID NO: 3136 - DNA, 24 bp, Homo sapiens
  source 1..24: mol_type = other DNA
tacagtgaaaactagtgactcagg

SEQ ID NO: 3137 - DNA, 25 bp, Homo sapiens
  source 1..25: mol_type = other DNA
tataggtgtaaaccagtgtgcctag

SEQ ID NO: 3138 - DNA, 23 bp, Homo sapiens
  source 1..23: mol_type = other DNA
tataggagaaacagtgaatagga

SEQ ID NO: 3139 - DNA, 23 bp, Homo sapiens
  source 1..23: mol_type = other DNA
tggaagaaaaccaatgagttggt

SEQ ID NO: 3140 - DNA, 23 bp, Homo sapiens
  source 1..23: mol_type = other DNA
aacaagaaaaccagtgatctggg

SEQ ID NO: 3141 - DNA, 23 bp, Homo sapiens
  source 1..23: mol_type = other DNA
gacaagaaaaccagtgagtgtgg

SEQ ID NO: 3142 - DNA, 23 bp, Homo sapiens
  source 1..23: mol_type = other DNA
tgggggaaaaccagtgagtcagg

SEQ ID NO: 3143 - DNA, 22 bp, Homo sapiens
  source 1..22: mol_type = other DNA
tatagcataccaatgagtctgg

SEQ ID NO: 3144 - DNA, 22 bp, Homo sapiens
  source 1..22: mol_type = other DNA
aagaagaaaaccagtggccagg

SEQ ID NO: 3145 - DNA, 22 bp, Homo sapiens
  source 1..22: mol_type = other DNA
gtggggaaaaccagtggtctgg

SEQ ID NO: 3146 - DNA, 22 bp, Homo sapiens
  source 1..22: mol_type = other DNA
tagaagtaaaccagaagtcagg

SEQ ID NO: 3147 - DNA, 22 bp, Homo sapiens
  source 1..22: mol_type = other DNA
tgcaggaaatccagtggtctgg

SEQ ID NO: 3148 - DNA, 24 bp, Homo sapiens
  source 1..24: mol_type = other DNA
tatacataaaaccagtgagaaggg

SEQ ID NO: 3149 - DNA, 23 bp, Homo sapiens
  source 1..23: mol_type = other DNA
agaaggaaaaccagggagtcaag

SEQ ID NO: 3150 - DNA, 23 bp, Homo sapiens
  source 1..23: mol_type = other DNA
agtttgaaaaccagtgagcctgg

SEQ ID NO: 3151 - DNA, 23 bp, Homo sapiens
  source 1..23: mol_type = other DNA
gacattaaaaccagtgagtatgg

SEQ ID NO: 3152 - DNA, 23 bp, Homo sapiens
  source 1..23: mol_type = other DNA
tataggttatccagtgaatctag

SEQ ID NO: 3153 - DNA, 23 bp, Homo sapiens
  source 1..23: mol_type = other DNA
tatcagaaaactagtgagtctgg

SEQ ID NO: 3154 - DNA, 24 bp, Homo sapiens
  source 1..24: mol_type = other DNA
aggaggaaaaccagaagagtctgg

SEQ ID NO: 3155 - DNA, 22 bp, Homo sapiens
  source 1..22: mol_type = other DNA
tgtataaaaaccactgatcagg

SEQ ID NO: 3156 - DNA, 22 bp, Homo sapiens
  source 1..22: mol_type = other DNA
tagaggaaaacagtgaaacagg

SEQ ID NO: 3157 - DNA, 22 bp, Homo sapiens
  source 1..22: mol_type = other DNA
gaaaggaaaaccatgaataagg

SEQ ID NO: 3158 - DNA, 23 bp, Homo sapiens
  source 1..23: mol_type = other DNA
tattaggaaagcagtgagttgga

SEQ ID NO: 3159 - DNA, 22 bp, Homo sapiens
  source 1..22: mol_type = other DNA
tgcaataaaaccaggagtctgg

SEQ ID NO: 3160 - DNA, 23 bp, Homo sapiens
  source 1..23: mol_type = other DNA
agtgagtaaaccagagagtctgg

SEQ ID NO: 3161 - DNA, 23 bp, Homo sapiens
  source 1..23: mol_type = other DNA
tgtagggagaccagtgaggggga

SEQ ID NO: 3162 - DNA, 23 bp, Homo sapiens
  source 1..23: mol_type = other DNA
atcatgaaaaccaatgattctgg

SEQ ID NO: 3163 - DNA, 23 bp, Homo sapiens
  source 1..23: mol_type = other DNA
tcctggtaaaccagtgagtcata

SEQ ID NO: 3164 - DNA, 22 bp, Homo sapiens
  source 1..22: mol_type = other DNA
tgtagagaaccagtgaatgagg

SEQ ID NO: 3165 - DNA, 23 bp, Homo sapiens
  source 1..23: mol_type = other DNA
aatacataaaccagtgagcatgg

SEQ ID NO: 3166 - DNA, 23 bp, Homo sapiens
  source 1..23: mol_type = other DNA
gacaagaaaaccagcgagtgtgg

SEQ ID NO: 3167 - DNA, 22 bp, Homo sapiens
  source 1..22: mol_type = other DNA
aataggagaaccaggagtcatg

SEQ ID NO: 3168 - DNA, 22 bp, Homo sapiens
  source 1..22: mol_type = other DNA
tataggaaagtcaggagttagg

SEQ ID NO: 3169 - DNA, 21 bp, Homo sapiens
  source 1..21: mol_type = other DNA
cttaggaaaatcagagtctgg

SEQ ID NO: 3170 - DNA, 21 bp, Homo sapiens
  source 1..21: mol_type = other DNA
tgtaagaaaaccagaggctgg

SEQ ID NO: 3171 - DNA, 23 bp, Homo sapiens
  source 1..23: mol_type = other DNA
aatagaaaaaacagtgaagttgg

SEQ ID NO: 3172 - DNA, 23 bp, Homo sapiens
  source 1..23: mol_type = other DNA
tatagtaaaacaagtgagaaatg

SEQ ID NO: 3173 - DNA, 23 bp, Homo sapiens
  source 1..23: mol_type = other DNA
gagaccaaaaccagtgagtaggt

SEQ ID NO: 3174 - DNA, 23 bp, Homo sapiens
  source 1..23: mol_type = other DNA
taggggagaaccagtgagtcagg

SEQ ID NO: 3175 - DNA, 24 bp, Homo sapiens
  source 1..24: mol_type = other DNA
tgtggacaaaaccagtgagtgtgg

SEQ ID NO: 3176 - DNA, 22 bp, Homo sapiens
  source 1..22: mol_type = other DNA
ggcaggaaaaccacgagtctgg

SEQ ID NO: 3177 - DNA, 23 bp, Homo sapiens
  source 1..23: mol_type = other DNA
tataggaataccagtgagttttg

SEQ ID NO: 3178 - DNA, 23 bp, Homo sapiens
  source 1..23: mol_type = other DNA
tagtggaaaaccagtgagagatt

SEQ ID NO: 3179 - DNA, 22 bp, Homo sapiens
  source 1..22: mol_type = other DNA
gagagggaagccatgagtctgg

SEQ ID NO: 3180 - DNA, 23 bp, Homo sapiens
  source 1..23: mol_type = other DNA
tttaggaacagctgtgagtatgt

SEQ ID NO: 3181 - DNA, 23 bp, Homo sapiens
  source 1..23: mol_type = other DNA
gaaaggaaaaccgctgagtacgc

SEQ ID NO: 3182 - DNA, 23 bp, Homo sapiens
  source 1..23: mol_type = other DNA
taaaggagaaccattgattcctc

SEQ ID NO: 3183 - DNA, 23 bp, Homo sapiens
  source 1..23: mol_type = other DNA
aatataataaacagtgagcctgg

SEQ ID NO: 3184 - DNA, 23 bp, Homo sapiens
  source 1..23: mol_type = other DNA
tataagaacaccagtaagattgg

SEQ ID NO: 3185 - DNA, 23 bp, Homo sapiens
  source 1..23: mol_type = other DNA
tataggagaaccaaagcatcagg

SEQ ID NO: 3186 - DNA, 23 bp, Homo sapiens
  source 1..23: mol_type = other DNA
cgtaggaaaacccaggactcagg

SEQ ID NO: 3187 - DNA, 23 bp, Homo sapiens
  source 1..23: mol_type = other DNA
aataggaaaatcaatgatacgag

SEQ ID NO: 3188 - DNA, 23 bp, Homo sapiens
  source 1..23: mol_type = other DNA
tataggaaagctattgagtttta

SEQ ID NO: 3189 - DNA, 23 bp, Homo sapiens
  source 1..23: mol_type = other DNA
aaaaggaaaaccagttggtagga

SEQ ID NO: 3190 - DNA, 23 bp, Homo sapiens
  source 1..23: mol_type = other DNA
tgtgctgataccagtgagtctgg

SEQ ID NO: 3191 - DNA, 23 bp, Homo sapiens
  source 1..23: mol_type = other DNA
aataagtaaaccagggattcgtg

SEQ ID NO: 3192 - DNA, 22 bp, Homo sapiens
  source 1..22: mol_type = other DNA
tttaggaaaaccatgtttaggg

SEQ ID NO: 3193 - DNA, 21 bp, Homo sapiens
  source 1..21: mol_type = other DNA
tttaggaaaaagtgattcagg

SEQ ID NO: 3194 - DNA, 23 bp, Homo sapiens
  source 1..23: mol_type = other DNA
tataggaatgcctgtgatttctg

SEQ ID NO: 3195 - DNA, 23 bp, Homo sapiens
  source 1..23: mol_type = other DNA
tatagcaataccactaagtatga

SEQ ID NO: 3196 - DNA, 23 bp, Homo sapiens
  source 1..23: mol_type = other DNA
tacaagcaaaacagtcagtccag

SEQ ID NO: 3197 - DNA, 23 bp, Homo sapiens
  source 1..23: mol_type = other DNA
tatatgaaaaccacagaggcact

SEQ ID NO: 3198 - DNA, 21 bp, Homo sapiens
  source 1..21: mol_type = other DNA
tataggaaaccctgtgacatg

SEQ ID NO: 3199 - DNA, 22 bp, Homo sapiens
  source 1..22: mol_type = other DNA
tataggaaaaccatgaggaata

SEQ ID NO: 3200 - DNA, 22 bp, Homo sapiens
  source 1..22: mol_type = other DNA
cataagaaaaccatgggccggg

SEQ ID NO: 3201 - DNA, 23 bp, Homo sapiens
  source 1..23: mol_type = other DNA
tataggaaaactagctagtaagg

SEQ ID NO: 3202 - DNA, 22 bp, Homo sapiens
  source 1..22: mol_type = other DNA
tagaggaaaaacagtagacagt

SEQ ID NO: 3203 - DNA, 22 bp, Homo sapiens
  source 1..22: mol_type = other DNA
tataagaaaccagtgagtcaga

SEQ ID NO: 3204 - DNA, 23 bp, Homo sapiens
  source 1..23: mol_type = other DNA
tataggagaaacagtgagtagga

SEQ ID NO: 3205 - DNA, 23 bp, Homo sapiens
  source 1..23: mol_type = other DNA
ttcaggaaaaccagtgagtcaca

SEQ ID NO: 3206 - DNA, 22 bp, Homo sapiens
  source 1..22: mol_type = other DNA
atgaggaaatccagtggtccgg

SEQ ID NO: 3207 - DNA, 22 bp, Homo sapiens
  source 1..22: mol_type = other DNA
tatagaaaaacagtaattctgg

SEQ ID NO: 3208 - DNA, 22 bp, Homo sapiens
  source 1..22: mol_type = other DNA
tatataaaaccactgagtcaag

SEQ ID NO: 3209 - DNA, 22 bp, Homo sapiens
  source 1..22: mol_type = other DNA
tacaggaaaaccagtggtctga

SEQ ID NO: 3210 - DNA, 23 bp, Homo sapiens
  source 1..23: mol_type = other DNA
tataagaaaccaagagagtctgg

SEQ ID NO: 3211 - DNA, 23 bp, Homo sapiens
  source 1..23: mol_type = other DNA
tataggaagacagttgagtctgg

SEQ ID NO: 3212 - DNA, 22 bp, Homo sapiens
  source 1..22: mol_type = other DNA
aacgtgaaaaccagtgagcagg

SEQ ID NO: 3213 - DNA, 23 bp, Homo sapiens
  source 1..23: mol_type = other DNA
cagggtaaaaccagagagtcaag

SEQ ID NO: 3214 - DNA, 23 bp, Homo sapiens
  source 1..23: mol_type = other DNA
cagaggaaaaacagtaagtaggt

SEQ ID NO: 3215 - DNA, 22 bp, Homo sapiens
  source 1..22: mol_type = other DNA
tataggaaacacagtggacagg

SEQ ID NO: 3216 - DNA, 23 bp, Homo sapiens
  source 1..23: mol_type = other DNA
aacaggaaaaccactgggtcagg

SEQ ID NO: 3217 - DNA, 23 bp, Homo sapiens
  source 1..23: mol_type = other DNA
attaggtcaaccagtgaggttgg

SEQ ID NO: 3218 - DNA, 23 bp, Homo sapiens
  source 1..23: mol_type = other DNA
tataagaataccagtaatatggg

SEQ ID NO: 3219 - DNA, 23 bp, Homo sapiens
  source 1..23: mol_type = other DNA
ttgaggagaaccagtgagtctgg

SEQ ID NO: 3220 - DNA, 22 bp, Homo sapiens
  source 1..22: mol_type = other DNA
tttctggaaaccatgagtcagg

SEQ ID NO: 3221 - DNA, 23 bp, Homo sapiens
  source 1..23: mol_type = other DNA
aataggtaaaccaatgagcatgg

SEQ ID NO: 3222 - DNA, 23 bp, Homo sapiens
  source 1..23: mol_type = other DNA
gactgtaaaaccagtaagtaggg

SEQ ID NO: 3223 - DNA, 22 bp, Homo sapiens
  source 1..22: mol_type = other DNA
gttaagaaaacagtgagtctag

SEQ ID NO: 3224 - DNA, 23 bp, Homo sapiens
  source 1..23: mol_type = other DNA
gaaaggaaaatcagtgggtctgg

SEQ ID NO: 3225 - DNA, 22 bp, Homo sapiens
  source 1..22: mol_type = other DNA
catacaaaaccagagagtgggg

SEQ ID NO: 3226 - DNA, 22 bp, Homo sapiens
  source 1..22: mol_type = other DNA
tgcaggaaacccatgagtcagg

SEQ ID NO: 3227 - DNA, 23 bp, Homo sapiens
  source 1..23: mol_type = other DNA
tataaaaataccagtgagtaaag

SEQ ID NO: 3228 - DNA, 22 bp, Homo sapiens
  source 1..22: mol_type = other DNA
attaggaaatgcagtgagcagg

SEQ ID NO: 3229 - DNA, 22 bp, Homo sapiens
  source 1..22: mol_type = other DNA
tatagagaaacagtaattctgg

SEQ ID NO: 3230 - DNA, 22 bp, Homo sapiens
  source 1..22: mol_type = other DNA
tataggacaccagtgattgttg

SEQ ID NO: 3231 - DNA, 24 bp, Homo sapiens
  source 1..24: mol_type = other DNA
gaaaggataaccagatgagtctgg

SEQ ID NO: 3232 - DNA, 23 bp, Homo sapiens
  source 1..23: mol_type = other DNA
tggaggaaaaacagggagtaggg

SEQ ID NO: 3233 - DNA, 22 bp, Homo sapiens
  source 1..22: mol_type = other DNA
tatagaaatacagtgagttgtg

SEQ ID NO: 3234 - DNA, 23 bp, Homo sapiens
  source 1..23: mol_type = other DNA
tatagtgaaaccaggtagtgggt

SEQ ID NO: 3235 - DNA, 22 bp, Homo sapiens
  source 1..22: mol_type = other DNA
tatagaaaaccactgaatttgg

SEQ ID NO: 3236 - DNA, 22 bp, Homo sapiens
  source 1..22: mol_type = other DNA
tatttgaaaaccatgagtcaga

SEQ ID NO: 3237 - DNA, 23 bp, Homo sapiens
  source 1..23: mol_type = other DNA
tggagaaaaaccagagagactgg

SEQ ID NO: 3238 - DNA, 23 bp, Homo sapiens
  source 1..23: mol_type = other DNA
atgaggaaaaccagtgaggagag

SEQ ID NO: 3239 - DNA, 22 bp, Homo sapiens
  source 1..22: mol_type = other DNA
aatagggaaacaatgagtttgg

SEQ ID NO: 3240 - DNA, 23 bp, Homo sapiens
  source 1..23: mol_type = other DNA
tagtaaagaaccagtgactcagg

SEQ ID NO: 3241 - DNA, 23 bp, Homo sapiens
  source 1..23: mol_type = other DNA
tatgactaaaccagtgggtacgg

SEQ ID NO: 3242 - DNA, 22 bp, Homo sapiens
  source 1..22: mol_type = other DNA
tgtagaaaaaacatgagttagg

SEQ ID NO: 3243 - DNA, 23 bp, Homo sapiens
  source 1..23: mol_type = other DNA
attaggaagacaagtgagtttgg

SEQ ID NO: 3244 - DNA, 23 bp, Homo sapiens
  source 1..23: mol_type = other DNA
gagattcaaaccagagagtcggg

SEQ ID NO: 3245 - DNA, 23 bp, Homo sapiens
  source 1..23: mol_type = other DNA
aaagggaaagccagagagtcagg

SEQ ID NO: 3246 - DNA, 23 bp, Homo sapiens
  source 1..23: mol_type = other DNA
ggtagggaagccagtgagccagg

SEQ ID NO: 3247 - DNA, 23 bp, Homo sapiens
  source 1..23: mol_type = other DNA
actctgaaaaccagtgaggcagg

SEQ ID NO: 3248 - DNA, 22 bp, Homo sapiens
  source 1..22: mol_type = other DNA
taaagtagtaccagtgagctgg

SEQ ID NO: 3249 - DNA, 23 bp, Homo sapiens
  source 1..23: mol_type = other DNA
tatggggaaaaccaagagtctgg

SEQ ID NO: 3250 - DNA, 22 bp, Homo sapiens
  source 1..22: mol_type = other DNA
aagaggaagccagagagtcagg

SEQ ID NO: 3251 - DNA, 23 bp, Homo sapiens
  source 1..23: mol_type = other DNA
aaaaaggaaaccattgagttggg

SEQ ID NO: 3252 - DNA, 22 bp, Homo sapiens
  source 1..22: mol_type = other DNA
aatactaaaaccaatagtcagg

SEQ ID NO: 3253 - DNA, 23 bp, Homo sapiens
  source 1..23: mol_type = other DNA
tggagtgtaaccattgagtctgg

SEQ ID NO: 3254 - DNA, 24 bp, Homo sapiens
  source 1..24: mol_type = other DNA
aaaagtataaaccaatgagtctgg

SEQ ID NO: 3255 - DNA, 21 bp, Homo sapiens
  source 1..21: mol_type = other DNA
tacaggtaccagtgagtcatg

SEQ ID NO: 3256 - DNA, 22 bp, Homo sapiens
  source 1..22: mol_type = other DNA
tgtggaagaccagtgagttgtg

SEQ ID NO: 3257 - DNA, 23 bp, Homo sapiens
  source 1..23: mol_type = other DNA
gatgggaaaaccagtgcgtttat

SEQ ID NO: 3258 - DNA, 22 bp, Homo sapiens
  source 1..22: mol_type = other DNA
gatagggaaaccagttagcaga

SEQ ID NO: 3259 - DNA, 23 bp, Homo sapiens
  source 1..23: mol_type = other DNA
tataggaatattagtgagtttga

SEQ ID NO: 3260 - DNA, 24 bp, Homo sapiens
  source 1..24: mol_type = other DNA
gatacggataaccagtgagtcaac

SEQ ID NO: 3261 - DNA, 22 bp, Homo sapiens
  source 1..22: mol_type = other DNA
aatcggaaaatcagtagtcatg

SEQ ID NO: 3262 - DNA, 22 bp, Homo sapiens
  source 1..22: mol_type = other DNA
tacaggataccagtgatactgg

SEQ ID NO: 3263 - DNA, 23 bp, Homo sapiens
  source 1..23: mol_type = other DNA
tatagagataccagtgtgtttgt

SEQ ID NO: 3264 - DNA, 22 bp, Homo sapiens
  source 1..22: mol_type = other DNA
tatagcaagaccttgagtcctg

SEQ ID NO: 3265 - DNA, 23 bp, Homo sapiens
  source 1..23: mol_type = other DNA
tacaggaaggccagagagacagt

SEQ ID NO: 3266 - DNA, 23 bp, Homo sapiens
  source 1..23: mol_type = other DNA
aatacgaaaaacagtcaggcgtg

SEQ ID NO: 3267 - DNA, 23 bp, Homo sapiens
  source 1..23: mol_type = other DNA
ctttgaaaaagcaatgagtctgg

SEQ ID NO: 3268 - DNA, 23 bp, Homo sapiens
  source 1..23: mol_type = other DNA
tataggaaaaactgtggtcctgt

SEQ ID NO: 3269 - DNA, 23 bp, Homo sapiens
  source 1..23: mol_type = other DNA
tgtgagcattccagtgagtcagg

SEQ ID NO: 3270 - DNA, 23 bp, Homo sapiens
  source 1..23: mol_type = other DNA
tttagaaagacctgagagtccag

SEQ ID NO: 3271 - DNA, 23 bp, Homo sapiens
  source 1..23: mol_type = other DNA
tataggagaaacagtggaccagg

SEQ ID NO: 3272 - DNA, 22 bp, Homo sapiens
  source 1..22: mol_type = other DNA
gataggaaaaccaagagtatgt

SEQ ID NO: 3273 - DNA, 22 bp, Homo sapiens
  source 1..22: mol_type = other DNA
tatagcaaaaccagtattaaga

SEQ ID NO: 3274 - DNA, 22 bp, Homo sapiens
  source 1..22: mol_type = other DNA
tataggaaaaaaagtagttaag

SEQ ID NO: 3275 - DNA, 23 bp, Homo sapiens
  source 1..23: mol_type = other DNA
aataggaaatccaggcagtggga

SEQ ID NO: 3276 - DNA, 23 bp, Homo sapiens
  source 1..23: mol_type = other DNA
tgatggaaaagcagagagtcatg

SEQ ID NO: 3277 - DNA, 23 bp, Homo sapiens
  source 1..23: mol_type = other DNA
aataagcaaataaatgagtctgg

SEQ ID NO: 3278 - DNA, 23 bp, Homo sapiens
  source 1..23: mol_type = other DNA
taggataaaagcagtgagtccgg

SEQ ID NO: 3279 - DNA, 23 bp, Homo sapiens
  source 1..23: mol_type = other DNA
gataggaaagccagggagagagg

SEQ ID NO: 3280 - DNA, 23 bp, Homo sapiens
  source 1..23: mol_type = other DNA
tgcaataaaaccagtgagtcgtc

SEQ ID NO: 3281 - DNA, 23 bp, Homo sapiens
  source 1..23: mol_type = other DNA
tatatgcaaaacagtgagccaag

SEQ ID NO: 3282 - DNA, 23 bp, Homo sapiens
  source 1..23: mol_type = other DNA
tggaagaaagccagtgtgcctgg

SEQ ID NO: 3283 - DNA, 21 bp, Homo sapiens
  source 1..21: mol_type = other DNA
tataagcaaacctaagtcagg

SEQ ID NO: 3284 - DNA, 22 bp, Homo sapiens
  source 1..22: mol_type = other DNA
caaaggaaaaccgagaatcagg

SEQ ID NO: 3285 - DNA, 22 bp, Homo sapiens
  source 1..22: mol_type = other DNA
tacagtagaaccatgaggcagg

SEQ ID NO: 3286 - DNA, 23 bp, Homo sapiens
  source 1..23: mol_type = other DNA
tacaggaaaaaaagtgaatggtg

SEQ ID NO: 3287 - DNA, 23 bp, Homo sapiens
  source 1..23: mol_type = other DNA
aatagtgagaccagtgtgtctgg

SEQ ID NO: 3288 - DNA, 23 bp, Homo sapiens
  source 1..23: mol_type = other DNA
aagaggaaaaccagtgtctgtgt

SEQ ID NO: 3289 - DNA, 23 bp, Homo sapiens
  source 1..23: mol_type = other DNA
aaaatgtaaaccagtaagcccgg

SEQ ID NO: 3290 - DNA, 24 bp, Homo sapiens
  source 1..24: mol_type = other DNA
tgtaggaagaaccagtggatcggg

SEQ ID NO: 3291 - DNA, 22 bp, Homo sapiens
  source 1..22: mol_type = other DNA
agtaggagaaccatgagttggg

SEQ ID NO: 3292 - DNA, 23 bp, Homo sapiens
  source 1..23: mol_type = other DNA
tataaggacaccagtgagactgg

SEQ ID NO: 3293 - DNA, 23 bp, Homo sapiens
  source 1..23: mol_type = other DNA
aataagaaaaccagtttgtgggc

SEQ ID NO: 3294 - DNA, 22 bp, Homo sapiens
  source 1..22: mol_type = other DNA
aataggagaccagttagtctgg

SEQ ID NO: 3295 - DNA, 23 bp, Homo sapiens
  source 1..23: mol_type = other DNA
tgggggaaaaccagtgagtagag

SEQ ID NO: 3296 - DNA, 22 bp, Homo sapiens
  source 1..22: mol_type = other DNA
catataaaaccaatgagtcaag

SEQ ID NO: 3297 - DNA, 22 bp, Homo sapiens
  source 1..22: mol_type = other DNA
gatgggaaaaccaatggtcggg

SEQ ID NO: 3298 - DNA, 24 bp, Homo sapiens
  source 1..24: mol_type = other DNA
aggaggaaaaccaggagagtctgg

SEQ ID NO: 3299 - DNA, 22 bp, Homo sapiens
  source 1..22: mol_type = other DNA
tatacataaaccagtgatatgg

SEQ ID NO: 3300 - DNA, 23 bp, Homo sapiens
  source 1..23: mol_type = other DNA
attaggataaccagtgtgtttgg

SEQ ID NO: 3301 - DNA, 22 bp, Homo sapiens
  source 1..22: mol_type = other DNA
tgtgaaaaaccagtgagtaggt

SEQ ID NO: 3302 - DNA, 23 bp, Homo sapiens
  source 1..23: mol_type = other DNA
tgagtggaaaccagtgagtcggc

SEQ ID NO: 3303 - DNA, 23 bp, Homo sapiens
  source 1..23: mol_type = other DNA
aaaaggaaaaccagtgaattaag

SEQ ID NO: 3304 - DNA, 23 bp, Homo sapiens
  source 1..23: mol_type = other DNA
gagataaaaaccagtgagtcaaa

SEQ ID NO: 3305 - DNA, 23 bp, Homo sapiens
  source 1..23: mol_type = other DNA
gatagaaaaaccagtgaaattgg

SEQ ID NO: 3306 - DNA, 23 bp, Homo sapiens
  source 1..23: mol_type = other DNA
aaatggaaaaccattgagtaggc

SEQ ID NO: 3307 - DNA, 23 bp, Homo sapiens
  source 1..23: mol_type = other DNA
caaaggaaaaccagagagtggat

SEQ ID NO: 3308 - DNA, 22 bp, Homo sapiens
  source 1..22: mol_type = other DNA
cattggaaaaccatgtgtcagg

SEQ ID NO: 3309 - DNA, 23 bp, Homo sapiens
  source 1..23: mol_type = other DNA
tctaagaaaatcagtgagcaggg

SEQ ID NO: 3310 - DNA, 23 bp, Homo sapiens
  source 1..23: mol_type = other DNA
tataggaaaatcagtggctatgg

SEQ ID NO: 3311 - DNA, 22 bp, Homo sapiens
  source 1..22: mol_type = other DNA
taaggaaaaccagggaatgggc

SEQ ID NO: 3312 - DNA, 22 bp, Homo sapiens
  source 1..22: mol_type = other DNA
taaggaaaaccagagaatgggt

SEQ ID NO: 3313 - DNA, 24 bp, Homo sapiens
  source 1..24: mol_type = other DNA
aacagagaaaaccagtgactgggg

SEQ ID NO: 3314 - DNA, 22 bp, Homo sapiens
  source 1..22: mol_type = other DNA
aataagagaatcagtggtcagg

SEQ ID NO: 3315 - DNA, 23 bp, Homo sapiens
  source 1..23: mol_type = other DNA
tgtaggtaaacctgtgacttggg

SEQ ID NO: 3316 - DNA, 23 bp, Homo sapiens
  source 1..23: mol_type = other DNA
tctgggttaaccagtgagtgggt

SEQ ID NO: 3317 - DNA, 23 bp, Homo sapiens
  source 1..23: mol_type = other DNA
ggatggagaaccactgagtctgg

SEQ ID NO: 3318 - DNA, 23 bp, Homo sapiens
  source 1..23: mol_type = other DNA
ggaagggaaaacagtgagtcagg

SEQ ID NO: 3319 - DNA, 22 bp, Homo sapiens
  source 1..22: mol_type = other DNA
actaggaaaaccagtactgcgg

SEQ ID NO: 3320 - DNA, 23 bp, Homo sapiens
  source 1..23: mol_type = other DNA
tgtagaaaaaccagtaaccccag

SEQ ID NO: 3321 - DNA, 22 bp, Homo sapiens
  source 1..22: mol_type = other DNA
aataggaaagacagtgatctgt

SEQ ID NO: 3322 - DNA, 23 bp, Homo sapiens
  source 1..23: mol_type = other DNA
gctggtagaaccactgagtctgg

SEQ ID NO: 3323 - DNA, 23 bp, Homo sapiens
  source 1..23: mol_type = other DNA
catctgaaaaccagagagttgga

SEQ ID NO: 3324 - DNA, 23 bp, Homo sapiens
  source 1..23: mol_type = other DNA
tgttgtgaaaccagagagtatgg

SEQ ID NO: 3325 - DNA, 23 bp, Homo sapiens
  source 1..23: mol_type = other DNA
gcaaggaaaacaaatgagtcctg

SEQ ID NO: 3326 - DNA, 23 bp, Homo sapiens
  source 1..23: mol_type = other DNA
tatagggacaccggtgagcttgg

SEQ ID NO: 3327 - DNA, 23 bp, Homo sapiens
  source 1..23: mol_type = other DNA
tataggaaaaccaaggagctcct

SEQ ID NO: 3328 - DNA, 24 bp, Homo sapiens
  source 1..24: mol_type = other DNA
gaggggaaagaccagagagtcggg

SEQ ID NO: 3329 - DNA, 22 bp, Homo sapiens
  source 1..22: mol_type = other DNA
taaaggaaaaccctgagtagga

SEQ ID NO: 3330 - DNA, 22 bp, Homo sapiens
  source 1..22: mol_type = other DNA
tctgtgaataccaggagtccgg

SEQ ID NO: 3331 - DNA, 22 bp, Homo sapiens
  source 1..22: mol_type = other DNA
tataggcagaccagtggtcctt

SEQ ID NO: 3332 - DNA, 23 bp, Homo sapiens
  source 1..23: mol_type = other DNA
cacaggagaaccaatgagcctgg

SEQ ID NO: 3333 - DNA, 23 bp, Homo sapiens
  source 1..23: mol_type = other DNA
gctaggaaaacagctgagcctgg

SEQ ID NO: 3334 - DNA, 22 bp, Homo sapiens
  source 1..22: mol_type = other DNA
tccaggaaaaccaggagcaggg

SEQ ID NO: 3335 - DNA, 22 bp, Homo sapiens
  source 1..22: mol_type = other DNA
gatagaaacacagtgagcctgg

SEQ ID NO: 3336 - DNA, 23 bp, Homo sapiens
  source 1..23: mol_type = other DNA
cagaggcacaccagtgagtcagg

SEQ ID NO: 3337 - DNA, 23 bp, Homo sapiens
  source 1..23: mol_type = other DNA
ggaagggaaaacagcgagtcagg

SEQ ID NO: 3338 - DNA, 23 bp, Homo sapiens
  source 1..23: mol_type = other DNA
aataggtaaaccagtaagtacta

SEQ ID NO: 3339 - DNA, 23 bp, Homo sapiens
  source 1..23: mol_type = other DNA
aataggaaaaccagagaggaagc

SEQ ID NO: 3340 - DNA, 22 bp, Homo sapiens
  source 1..22: mol_type = other DNA
tatagaataaccagtagtagag

SEQ ID NO: 3341 - DNA, 22 bp, Homo sapiens
  source 1..22: mol_type = other DNA
gaaataaaaaccgtgagtcagg

SEQ ID NO: 3342 - DNA, 23 bp, Homo sapiens
  source 1..23: mol_type = other DNA
gataggaaaatcagtgtacttgg

SEQ ID NO: 3343 - DNA, 23 bp, Homo sapiens
  source 1..23: mol_type = other DNA
cacagggaaaccagtgggtttgg

SEQ ID NO: 3344 - DNA, 23 bp, Homo sapiens
  source 1..23: mol_type = other DNA
tagaggggacccagaaagtctgg

SEQ ID NO: 3345 - DNA, 23 bp, Homo sapiens
  source 1..23: mol_type = other DNA
tcttgaaaaacaagtgagtactg

SEQ ID NO: 3346 - DNA, 23 bp, Homo sapiens
  source 1..23: mol_type = other DNA
tatatgaaaaccagtagattgag

SEQ ID NO: 3347 - DNA, 23 bp, Homo sapiens
  source 1..23: mol_type = other DNA
tataggaattgcattgaatctgt

SEQ ID NO: 3348 - DNA, 22 bp, Homo sapiens
  source 1..22: mol_type = other DNA
tgtgggagaaccatgagtccag

SEQ ID NO: 3349 - DNA, 23 bp, Homo sapiens
  source 1..23: mol_type = other DNA
catagaaataccagccagtcccg

SEQ ID NO: 3350 - DNA, 23 bp, Homo sapiens
  source 1..23: mol_type = other DNA
tccaagaaaaccactgagacctg

SEQ ID NO: 3351 - DNA, 23 bp, Homo sapiens
  source 1..23: mol_type = other DNA
tacataaaaaccaatgagttctg

SEQ ID NO: 3352 - DNA, 23 bp, Homo sapiens
  source 1..23: mol_type = other DNA
tgtaggataataagtgatcctgg

SEQ ID NO: 3353 - DNA, 22 bp, Homo sapiens
  source 1..22: mol_type = other DNA
tatagaaataccgtgaaccagg

SEQ ID NO: 3354 - DNA, 22 bp, Homo sapiens
  source 1..22: mol_type = other DNA
catagcaaaaccatgagtcaag

SEQ ID NO: 3355 - DNA, 22 bp, Homo sapiens
  source 1..22: mol_type = other DNA
tataggatatcagtgaggcagg

SEQ ID NO: 3356 - DNA, 22 bp, Homo sapiens
  source 1..22: mol_type = other DNA
tgtaggataacagtgagtaggg

SEQ ID NO: 3357 - DNA, 22 bp, Homo sapiens
  source 1..22: mol_type = other DNA
agtagaaaaaccactgagctgg

SEQ ID NO: 3358 - DNA, 22 bp, Homo sapiens
  source 1..22: mol_type = other DNA
catatggaaccagtgactctgg

SEQ ID NO: 3359 - DNA, 23 bp, Homo sapiens
  source 1..23: mol_type = other DNA
gataggaaaaccagttaggaggt

SEQ ID NO: 3360 - DNA, 23 bp, Homo sapiens
  source 1..23: mol_type = other DNA
caggggaaaaccagtgagccagg

SEQ ID NO: 3361 - DNA, 21 bp, Homo sapiens
  source 1..21: mol_type = other DNA
tataggctacagtgagtcatg

SEQ ID NO: 3362 - DNA, 22 bp, Homo sapiens
  source 1..22: mol_type = other DNA
agtaggaggccagtgagtcagg

SEQ ID NO: 3363 - DNA, 23 bp, Homo sapiens
  source 1..23: mol_type = other DNA
agggagaaaaccagtgagtgtgg

SEQ ID NO: 3364 - DNA, 22 bp, Homo sapiens
  source 1..22: mol_type = other DNA
tatttggaaaccatgagtctga

SEQ ID NO: 3365 - DNA, 22 bp, Homo sapiens
  source 1..22: mol_type = other DNA
gatagggaaaccaggaaccagg

SEQ ID NO: 3366 - DNA, 22 bp, Homo sapiens
  source 1..22: mol_type = other DNA
tgtcagaaaaccagtgaacagg

SEQ ID NO: 3367 - DNA, 23 bp, Homo sapiens
  source 1..23: mol_type = other DNA
tggaggtaaaccagtgaatctgg

SEQ ID NO: 3368 - DNA, 23 bp, Homo sapiens
  source 1..23: mol_type = other DNA
gctagcaaaaccagtaagttggt

SEQ ID NO: 3369 - DNA, 22 bp, Homo sapiens
  source 1..22: mol_type = other DNA
cataggaaaacagtgggtgtgg

SEQ ID NO: 3370 - DNA, 22 bp, Homo sapiens
  source 1..22: mol_type = other DNA
tgttgaaaaccagtgagttcag

SEQ ID NO: 3371 - DNA, 23 bp, Homo sapiens
  source 1..23: mol_type = other DNA
tataaggaatccagtgagtagtg

SEQ ID NO: 3372 - DNA, 22 bp, Homo sapiens
  source 1..22: mol_type = other DNA
cataagaaagcagtgagtcaga

SEQ ID NO: 3373 - DNA, 23 bp, Homo sapiens
  source 1..23: mol_type = other DNA
cataagtaaagcagtgagtctgg

SEQ ID NO: 3374 - DNA, 22 bp, Homo sapiens
  source 1..22: mol_type = other DNA
tgtagcaaaaacagtgatcaga

SEQ ID NO: 3375 - DNA, 22 bp, Homo sapiens
  source 1..22: mol_type = other DNA
tctcagaaaaccaatgagctgg

SEQ ID NO: 3376 - DNA, 22 bp, Homo sapiens
  source 1..22: mol_type = other DNA
tatggggaaccagtgagtgagg

SEQ ID NO: 3377 - DNA, 22 bp, Homo sapiens
  source 1..22: mol_type = other DNA
tttctaaaaaccatgagtctgg

SEQ ID NO: 3378 - DNA, 23 bp, Homo sapiens
  source 1..23: mol_type = other DNA
tgcagggaaaccagtcagtagga

SEQ ID NO: 3379 - DNA, 22 bp, Homo sapiens
  source 1..22: mol_type = other DNA
cttcggaaaaccagtgaccagg

SEQ ID NO: 3380 - DNA, 23 bp, Homo sapiens
  source 1..23: mol_type = other DNA
tataagaaaaccagtgcaagtgt

SEQ ID NO: 3381 - DNA, 22 bp, Homo sapiens
  source 1..22: mol_type = other DNA
tataagaaaccagtgagacaaa

SEQ ID NO: 3382 - DNA, 23 bp, Homo sapiens
  source 1..23: mol_type = other DNA
tataggaaaaccaggggtcaaag

SEQ ID NO: 3383 - DNA, 23 bp, Homo sapiens
  source 1..23: mol_type = other DNA
tatatagaagccagtggatctgg

SEQ ID NO: 3384 - DNA, 24 bp, Homo sapiens
  source 1..24: mol_type = other DNA
tatagagcaaaccagtgagggaag

SEQ ID NO: 3385 - DNA, 22 bp, Homo sapiens
  source 1..22: mol_type = other DNA
tatagcaaaccaatgatcctgg

SEQ ID NO: 3386 - DNA, 23 bp, Homo sapiens
  source 1..23: mol_type = other DNA
aaacggaaaaccagggagtctga

SEQ ID NO: 3387 - DNA, 23 bp, Homo sapiens
  source 1..23: mol_type = other DNA
tctactgaaacctgtgagtcagg

SEQ ID NO: 3388 - DNA, 22 bp, Homo sapiens
  source 1..22: mol_type = other DNA
cataaaaaaacagtgagtcggt

SEQ ID NO: 3389 - DNA, 23 bp, Homo sapiens
  source 1..23: mol_type = other DNA
taggtgtaaaccactgagcccgg

SEQ ID NO: 3390 - DNA, 22 bp, Homo sapiens
  source 1..22: mol_type = other DNA
tgttggaaaccagtgaggtagg

SEQ ID NO: 3391 - DNA, 23 bp, Homo sapiens
  source 1..23: mol_type = other DNA
ctcatgaaaaacagtgagtcagg

SEQ ID NO: 3392 - DNA, 24 bp, Homo sapiens
  source 1..24: mol_type = other DNA
tataggttaactaatgaggtctgg

SEQ ID NO: 3393 - DNA, 22 bp, Homo sapiens
  source 1..22: mol_type = other DNA
agaaggaaaaccagtggtcatg

SEQ ID NO: 3394 - DNA, 24 bp, Homo sapiens
  source 1..24: mol_type = other DNA
aatagagaaaacaagtaagtcaag

SEQ ID NO: 3395 - DNA, 23 bp, Homo sapiens
  source 1..23: mol_type = other DNA
tacaaataaaccagtgagtgtgt

SEQ ID NO: 3396 - DNA, 23 bp, Homo sapiens
  source 1..23: mol_type = other DNA
tataagaagaccagtgtggctgg

SEQ ID NO: 3397 - DNA, 22 bp, Homo sapiens
  source 1..22: mol_type = other DNA
tatagaaacccaatgagctggg

SEQ ID NO: 3398 - DNA, 23 bp, Homo sapiens
  source 1..23: mol_type = other DNA
tagaggaaaacaaatgaatcaac

SEQ ID NO: 3399 - DNA, 23 bp, Homo sapiens
  source 1..23: mol_type = other DNA
taggtgaaagccactgagcccgg

SEQ ID NO: 3400 - DNA, 23 bp, Homo sapiens
  source 1..23: mol_type = other DNA
tttaggaaatccagtatttctgg

SEQ ID NO: 3401 - DNA, 23 bp, Homo sapiens
  source 1..23: mol_type = other DNA
cccaggacacccagtgagtgagg

SEQ ID NO: 3402 - DNA, 23 bp, Homo sapiens
  source 1..23: mol_type = other DNA
tatagataaatcagtggctgggg

SEQ ID NO: 3403 - DNA, 23 bp, Homo sapiens
  source 1..23: mol_type = other DNA
tataggacaaccagtgatgacca

SEQ ID NO: 3404 - DNA, 23 bp, Homo sapiens
  source 1..23: mol_type = other DNA
caaggaaaaaccagggagccagg

SEQ ID NO: 3405 - DNA, 22 bp, Homo sapiens
  source 1..22: mol_type = other DNA
tatatgaaaaacactagtttgg

SEQ ID NO: 3406 - DNA, 22 bp, Homo sapiens
  source 1..22: mol_type = other DNA
tataggaaaacccagagtattg

SEQ ID NO: 3407 - DNA, 23 bp, Homo sapiens
  source 1..23: mol_type = other DNA
catagttaaactagtgaagctgg

SEQ ID NO: 3408 - DNA, 23 bp, Homo sapiens
  source 1..23: mol_type = other DNA
tataggaaaatcattcagtattt

SEQ ID NO: 3409 - DNA, 22 bp, Homo sapiens
  source 1..22: mol_type = other DNA
tataggtaaactgtgtgtcatg

SEQ ID NO: 3410 - DNA, 22 bp, Homo sapiens
  source 1..22: mol_type = other DNA
aaaaggaaagccagtgacctgg

SEQ ID NO: 3411 - DNA, 23 bp, Homo sapiens
  source 1..23: mol_type = other DNA
aaatagaaaaccagtaagtcatg

SEQ ID NO: 3412 - DNA, 23 bp, Homo sapiens
  source 1..23: mol_type = other DNA
tatagtaaaactagtgggtggga

SEQ ID NO: 3413 - DNA, 24 bp, Homo sapiens
  source 1..24: mol_type = other DNA
aaaaggaataaccagtgagtagga

SEQ ID NO: 3414 - DNA, 23 bp, Homo sapiens
  source 1..23: mol_type = other DNA
tctttggaaaccagagagtcaag

SEQ ID NO: 3415 - DNA, 23 bp, Homo sapiens
  source 1..23: mol_type = other DNA
agtaagaaaacaagtgagcaggg

SEQ ID NO: 3416 - DNA, 22 bp, Homo sapiens
  source 1..22: mol_type = other DNA
cgtttgaaaaccatgagtctgg

SEQ ID NO: 3417 - DNA, 22 bp, Homo sapiens
  source 1..22: mol_type = other DNA
taatgaaaaaccatgagtcggg

SEQ ID NO: 3418 - DNA, 24 bp, Homo sapiens
  source 1..24: mol_type = other DNA
tatatggaaaacccttgagtggga

SEQ ID NO: 3419 - DNA, 23 bp, Homo sapiens
  source 1..23: mol_type = other DNA
attttggaaaccagtgagtcaga

SEQ ID NO: 3420 - DNA, 23 bp, Homo sapiens
  source 1..23: mol_type = other DNA
acagagaaaaccagtgagactgg

SEQ ID NO: 3421 - DNA, 24 bp, Homo sapiens
  source 1..24: mol_type = other DNA
tgtagaaaaaaccagcaagtcagg

SEQ ID NO: 3422 - DNA, 23 bp, Homo sapiens
  source 1..23: mol_type = other DNA
aaaaggaaaaccagagactgggt

SEQ ID NO: 3423 - DNA, 21 bp, Homo sapiens
  source 1..21: mol_type = other DNA
cttaggaaacagtgagtgagg

SEQ ID NO: 3424 - DNA, 23 bp, Homo sapiens
  source 1..23: mol_type = other DNA
ggttggaaaaccagtgggtgggt

SEQ ID NO: 3425 - DNA, 23 bp, Homo sapiens
  source 1..23: mol_type = other DNA
cagaggaaaaccagtgctggggg

SEQ ID NO: 3426 - DNA, 23 bp, Homo sapiens
  source 1..23: mol_type = other DNA
tatagggaaaccagaaggcaggg

SEQ ID NO: 3427 - DNA, 23 bp, Homo sapiens
  source 1..23: mol_type = other DNA
aggtgggaaaccagtgagtccag

SEQ ID NO: 3428 - DNA, 23 bp, Homo sapiens
  source 1..23: mol_type = other DNA
tataaggatacctgtgagccggg

SEQ ID NO: 3429 - DNA, 22 bp, Homo sapiens
  source 1..22: mol_type = other DNA
tgtagtaaaactaggagtccag

SEQ ID NO: 3430 - DNA, 21 bp, Homo sapiens
  source 1..21: mol_type = other DNA
tgtatgtaaaccagtgacagg

SEQ ID NO: 3431 - DNA, 24 bp, Homo sapiens
  source 1..24: mol_type = other DNA
tatatggaaaactagagagtaggg

SEQ ID NO: 3432 - DNA, 23 bp, Homo sapiens
  source 1..23: mol_type = other DNA
tataggaagtccagtgagccttg

SEQ ID NO: 3433 - DNA, 23 bp, Homo sapiens
  source 1..23: mol_type = other DNA
catagcaaagccagggagtggga

SEQ ID NO: 3434 - DNA, 22 bp, Homo sapiens
  source 1..22: mol_type = other DNA
tataagaataaagtgagtgagg

SEQ ID NO: 3435 - DNA, 23 bp, Homo sapiens
  source 1..23: mol_type = other DNA
caggcgtgaaccagtgagtctgg

SEQ ID NO: 3436 - DNA, 23 bp, Homo sapiens
  source 1..23: mol_type = other DNA
aggacggaaaccagggagtccgg

SEQ ID NO: 3437 - DNA, 21 bp, Homo sapiens
  source 1..21: mol_type = other DNA
cctaggaaacagagagtcggg

SEQ ID NO: 3438 - DNA, 23 bp, Homo sapiens
  source 1..23: mol_type = other DNA
agtaggaagaccagcgaggctgg

SEQ ID NO: 3439 - DNA, 21 bp, Homo sapiens
  source 1..21: mol_type = other DNA
tgtgggaaaaccagtttctgg

SEQ ID NO: 3440 - DNA, 23 bp, Homo sapiens
  source 1..23: mol_type = other DNA
agtaggaaaacatgtgagtaaag

SEQ ID NO: 3441 - DNA, 22 bp, Homo sapiens
  source 1..22: mol_type = other DNA
taatggaaaaccagtaatgagg

SEQ ID NO: 3442 - DNA, 25 bp, Homo sapiens
  source 1..25: mol_type = other DNA
tatagaaaaacctaagtaagactgg

SEQ ID NO: 3443 - DNA, 23 bp, Homo sapiens
  source 1..23: mol_type = other DNA
agaaagaaacccagagagtcagg

SEQ ID NO: 3444 - DNA, 23 bp, Homo sapiens
  source 1..23: mol_type = other DNA
aagaggaaagcaaaggagtcagg

SEQ ID NO: 3445 - DNA, 23 bp, Homo sapiens
  source 1..23: mol_type = other DNA
attaggaaaaccagccaggcatg

SEQ ID NO: 3446 - DNA, 22 bp, Homo sapiens
  source 1..22: mol_type = other DNA
taaatggtaaccaggagtctgg

SEQ ID NO: 3447 - DNA, 23 bp, Homo sapiens
  source 1..23: mol_type = other DNA
tattcgagaaccattgattcctg

SEQ ID NO: 3448 - DNA, 23 bp, Homo sapiens
  source 1..23: mol_type = other DNA
tcttggacaagcagtgagcaagg

SEQ ID NO: 3449 - DNA, 23 bp, Homo sapiens
  source 1..23: mol_type = other DNA
tgtaggtaaacttttgagtcagg

SEQ ID NO: 3450 - DNA, 23 bp, Homo sapiens
  source 1..23: mol_type = other DNA
tatagggacaccagtgatgtcag

SEQ ID NO: 3451 - DNA, 22 bp, Homo sapiens
  source 1..22: mol_type = other DNA
aataggagaactaggagacagg

SEQ ID NO: 3452 - DNA, 23 bp, Homo sapiens
  source 1..23: mol_type = other DNA
aggagggaaaccagtgagcaggg

SEQ ID NO: 3453 - DNA, 22 bp, Homo sapiens
  source 1..22: mol_type = other DNA
gatagtaaaccagtgagcaggg

SEQ ID NO: 3454 - DNA, 21 bp, Homo sapiens
  source 1..21: mol_type = other DNA
ggtaggaaccagtgagtcaga

SEQ ID NO: 3455 - DNA, 23 bp, Homo sapiens
  source 1..23: mol_type = other DNA
tgtaggtaaaccagtgtcatggg

SEQ ID NO: 3456 - DNA, 22 bp, Homo sapiens
  source 1..22: mol_type = other DNA
aataggagtccagtgagtttgg

SEQ ID NO: 3457 - DNA, 22 bp, Homo sapiens
  source 1..22: mol_type = other DNA
tctaggaaaaccatgagttggg

SEQ ID NO: 3458 - DNA, 23 bp, Homo sapiens
  source 1..23: mol_type = other DNA
tgtaggaagaccagtgaggccag

SEQ ID NO: 3459 - DNA, 23 bp, Homo sapiens
  source 1..23: mol_type = other DNA
ggaaggaaaaccagtgaggaggc

SEQ ID NO: 3460 - DNA, 21 bp, Homo sapiens
  source 1..21: mol_type = other DNA
tgtaggaaccagtgattgagg

SEQ ID NO: 3461 - DNA, 23 bp, Homo sapiens
  source 1..23: mol_type = other DNA
ttaagagaaaccagtgagtagga

SEQ ID NO: 3462 - DNA, 21 bp, Homo sapiens
  source 1..21: mol_type = other DNA
aataggaaacagtgagtacag

SEQ ID NO: 3463 - DNA, 23 bp, Homo sapiens
  source 1..23: mol_type = other DNA
tggggggaaaccagtgagtcagg

SEQ ID NO: 3464 - DNA, 23 bp, Homo sapiens
  source 1..23: mol_type = other DNA
gataggaaaacctatgaatagga

SEQ ID NO: 3465 - DNA, 23 bp, Homo sapiens
  source 1..23: mol_type = other DNA
cctaggaaagccagtgatttggt

SEQ ID NO: 3466 - DNA, 22 bp, Homo sapiens
  source 1..22: mol_type = other DNA
aataggaaaccagttgttctgg

SEQ ID NO: 3467 - DNA, 22 bp, Homo sapiens
  source 1..22: mol_type = other DNA
tttaggtatccagtgagttggg

SEQ ID NO: 3468 - DNA, 23 bp, Homo sapiens
  source 1..23: mol_type = other DNA
ggtaggaagaccagtgaggaagg

SEQ ID NO: 3469 - DNA, 22 bp, Homo sapiens
  source 1..22: mol_type = other DNA
tataggaagcaggtgagccagg

SEQ ID NO: 3470 - DNA, 22 bp, Homo sapiens
  source 1..22: mol_type = other DNA
tataataaaccagtgggccagg

SEQ ID NO: 3471 - DNA, 23 bp, Homo sapiens
  source 1..23: mol_type = other DNA
tagagcaaaaccagtgaatccag

SEQ ID NO: 3472 - DNA, 21 bp, Homo sapiens
  source 1..21: mol_type = other DNA
tgcaggaaaaccagagcctgg

SEQ ID NO: 3473 - DNA, 23 bp, Homo sapiens
  source 1..23: mol_type = other DNA
tatagggagaccagtgaggggct

SEQ ID NO: 3474 - DNA, 24 bp, Homo sapiens
  source 1..24: mol_type = other DNA
ctcagtaaaaccaggtgagtctgg

SEQ ID NO: 3475 - DNA, 23 bp, Homo sapiens
  source 1..23: mol_type = other DNA
tattaggacaccagtgtatcagg

SEQ ID NO: 3476 - DNA, 23 bp, Homo sapiens
  source 1..23: mol_type = other DNA
tataagaatcccagagagtcaag

SEQ ID NO: 3477 - DNA, 22 bp, Homo sapiens
  source 1..22: mol_type = other DNA
ttatggaaaaccaggattctgg

SEQ ID NO: 3478 - DNA, 23 bp, Homo sapiens
  source 1..23: mol_type = other DNA
aataggaaaacatgtgtgtcagg

SEQ ID NO: 3479 - DNA, 23 bp, Homo sapiens
  source 1..23: mol_type = other DNA
aagaggagaaccagagagtcaag

SEQ ID NO: 3480 - DNA, 23 bp, Homo sapiens
  source 1..23: mol_type = other DNA
atttttaaaaccagtgagtcctg

SEQ ID NO: 3481 - DNA, 23 bp, Homo sapiens
  source 1..23: mol_type = other DNA
gataggaaaaccagtgagggacc

SEQ ID NO: 3482 - DNA, 24 bp, Homo sapiens
  source 1..24: mol_type = other DNA
tgtaggatgaaccaatgagtgagg

SEQ ID NO: 3483 - DNA, 22 bp, Homo sapiens
  source 1..22: mol_type = other DNA
gatttgaaaccagagagtctgg

SEQ ID NO: 3484 - DNA, 23 bp, Homo sapiens
  source 1..23: mol_type = other DNA
cataggtaaactggtgagttggg

SEQ ID NO: 3485 - DNA, 22 bp, Homo sapiens
  source 1..22: mol_type = other DNA
tgaaggaaaccagggagtccag

SEQ ID NO: 3486 - DNA, 22 bp, Homo sapiens
  source 1..22: mol_type = other DNA
taaccagcaccagtgagtcggg

SEQ ID NO: 3487 - DNA, 22 bp, Homo sapiens
  source 1..22: mol_type = other DNA
cataggtaaacattgattctgg

SEQ ID NO: 3488 - DNA, 23 bp, Homo sapiens
  source 1..23: mol_type = other DNA
tgatagaaaaccagtggatctgg

SEQ ID NO: 3489 - DNA, 22 bp, Homo sapiens
  source 1..22: mol_type = other DNA
gatagttaaccagggagtctgg

SEQ ID NO: 3490 - DNA, 22 bp, Homo sapiens
  source 1..22: mol_type = other DNA
agtaggaaaaccagtagtctaa

SEQ ID NO: 3491 - DNA, 22 bp, Homo sapiens
  source 1..22: mol_type = other DNA
gatggaaagccagtgagctggg

SEQ ID NO: 3492 - DNA, 23 bp, Homo sapiens
  source 1..23: mol_type = other DNA
tactgtgaaaccagtgagtctgc

SEQ ID NO: 3493 - DNA, 22 bp, Homo sapiens
  source 1..22: mol_type = other DNA
tccaggataaccaatgagctgg

SEQ ID NO: 3494 - DNA, 23 bp, Homo sapiens
  source 1..23: mol_type = other DNA
tgtgggcgaaccagtgagtgagt

SEQ ID NO: 3495 - DNA, 23 bp, Homo sapiens
  source 1..23: mol_type = other DNA
tttcccaaaaccagtgagcatgg

SEQ ID NO: 3496 - DNA, 22 bp, Homo sapiens
  source 1..22: mol_type = other DNA
tgtagtaataacagtgatcagg

SEQ ID NO: 3497 - DNA, 22 bp, Homo sapiens
  source 1..22: mol_type = other DNA
tgaaagaaagccagtgagctgg

SEQ ID NO: 3498 - DNA, 23 bp, Homo sapiens
  source 1..23: mol_type = other DNA
gataggaaaagcagtgattttgg

SEQ ID NO: 3499 - DNA, 23 bp, Homo sapiens
  source 1..23: mol_type = other DNA
tgtaagaagagctgtgagtcaag

SEQ ID NO: 3500 - DNA, 23 bp, Homo sapiens
  source 1..23: mol_type = other DNA
tatctaataaccagtgagattgg

SEQ ID NO: 3501 - DNA, 23 bp, Homo sapiens
  source 1..23: mol_type = other DNA
aacagggaaaccagtgagcccaa

SEQ ID NO: 3502 - DNA, 22 bp, Homo sapiens
  source 1..22: mol_type = other DNA
gggaggaaaaaagtgagtctgg

SEQ ID NO: 3503 - DNA, 24 bp, Homo sapiens
  source 1..24: mol_type = other DNA
catagaagaaccagtgatatcagg

SEQ ID NO: 3504 - DNA, 22 bp, Homo sapiens
  source 1..22: mol_type = other DNA
tattttaaaaccagtagtcaag

SEQ ID NO: 3505 - DNA, 23 bp, Homo sapiens
  source 1..23: mol_type = other DNA
tataagaaaaacagagaaacggc

SEQ ID NO: 3506 - DNA, 23 bp, Homo sapiens
  source 1..23: mol_type = other DNA
aataggtaaacaaaggagtgtgg

SEQ ID NO: 3507 - DNA, 22 bp, Homo sapiens
  source 1..22: mol_type = other DNA
gataagaaaactaagagtcagg

SEQ ID NO: 3508 - DNA, 21 bp, Homo sapiens
  source 1..21: mol_type = other DNA
tctaggaaaaccagagtcaga

SEQ ID NO: 3509 - DNA, 23 bp, Homo sapiens
  source 1..23: mol_type = other DNA
aataggaacagaagttactcagg

SEQ ID NO: 3510 - DNA, 23 bp, Homo sapiens
  source 1..23: mol_type = other DNA
tgtaagaaaaccagtgcttggag

SEQ ID NO: 3511 - DNA, 23 bp, Homo sapiens
  source 1..23: mol_type = other DNA
aacaggtaaaccagtgaggctcc

SEQ ID NO: 3512 - DNA, 23 bp, Homo sapiens
  source 1..23: mol_type = other DNA
catagaataaccagagtgtcatg

SEQ ID NO: 3513 - DNA, 23 bp, Homo sapiens
  source 1..23: mol_type = other DNA
tatagaaacactactgagttttg

SEQ ID NO: 3514 - DNA, 22 bp, Homo sapiens
  source 1..22: mol_type = other DNA
gacaggaaaaccaggggtctga

SEQ ID NO: 3515 - DNA, 23 bp, Homo sapiens
  source 1..23: mol_type = other DNA
tataagaacacttgtgacttagg

SEQ ID NO: 3516 - DNA, 23 bp, Homo sapiens
  source 1..23: mol_type = other DNA
gataggaaaaggagtttggcagg

SEQ ID NO: 3517 - DNA, 22 bp, Homo sapiens
  source 1..22: mol_type = other DNA
tataggaaaacaggaactctgg

SEQ ID NO: 3518 - DNA, 23 bp, Homo sapiens
  source 1..23: mol_type = other DNA
tataataaaaccagtgataaggg

SEQ ID NO: 3519 - DNA, 23 bp, Homo sapiens
  source 1..23: mol_type = other DNA
ataaagaaaaacagtgagtctgg

SEQ ID NO: 3520 - DNA, 22 bp, Homo sapiens
  source 1..22: mol_type = other DNA
aatgtaaaaaccatgagtcagg

SEQ ID NO: 3521 - DNA, 23 bp, Homo sapiens
  source 1..23: mol_type = other DNA
tatagagagaccagtgagccaag

SEQ ID NO: 3522 - DNA, 23 bp, Homo sapiens
  source 1..23: mol_type = other DNA
attaggaacaccagtgagttgcc

SEQ ID NO: 3523 - DNA, 23 bp, Homo sapiens
  source 1..23: mol_type = other DNA
tataaggataccagtaatactgg

SEQ ID NO: 3524 - DNA, 23 bp, Homo sapiens
  source 1..23: mol_type = other DNA
actaggaaatccagtgactcagg

SEQ ID NO: 3525 - DNA, 23 bp, Homo sapiens
  source 1..23: mol_type = other DNA
cttcagaaaaccagggagtctgg

SEQ ID NO: 3526 - DNA, 23 bp, Homo sapiens
  source 1..23: mol_type = other DNA
gtcaagaaaaccagtgattcaga

SEQ ID NO: 3527 - DNA, 23 bp, Homo sapiens
  source 1..23: mol_type = other DNA
gatagaaaaaacagtgagttaga

SEQ ID NO: 3528 - DNA, 23 bp, Homo sapiens
  source 1..23: mol_type = other DNA
tataagaaaaccagtcagattgg

SEQ ID NO: 3529 - DNA, 24 bp, Homo sapiens
  source 1..24: mol_type = other DNA
gctgggagaaaccagtgagtttgg

SEQ ID NO: 3530 - DNA, 23 bp, Homo sapiens
  source 1..23: mol_type = other DNA
aatacataaaccaatgagtaggg

SEQ ID NO: 3531 - DNA, 23 bp, Homo sapiens
  source 1..23: mol_type = other DNA
tattggcaaaccagtgagtcgaa

SEQ ID NO: 3532 - DNA, 23 bp, Homo sapiens
  source 1..23: mol_type = other DNA
tggaggaaggccagtgagttggg

SEQ ID NO: 3533 - DNA, 23 bp, Homo sapiens
  source 1..23: mol_type = other DNA
catagtaaaaccactgagcacag

SEQ ID NO: 3534 - DNA, 24 bp, Homo sapiens
  source 1..24: mol_type = other DNA
tataaagaaaccagtgaagtcctg

SEQ ID NO: 3535 - DNA, 22 bp, Homo sapiens
  source 1..22: mol_type = other DNA
tttttgaaaaccagttatcagg

SEQ ID NO: 3536 - DNA, 22 bp, Homo sapiens
  source 1..22: mol_type = other DNA
gatcagaaaacagtgagttagg

SEQ ID NO: 3537 - DNA, 21 bp, Homo sapiens
  source 1..21: mol_type = other DNA
ggtaggaagaccagagtcagg

SEQ ID NO: 3538 - DNA, 23 bp, Homo sapiens
  source 1..23: mol_type = other DNA
aattggaaagccagtgatatggg

SEQ ID NO: 3539 - DNA, 23 bp, Homo sapiens
  source 1..23: mol_type = other DNA
cataggaaaagaagtgatttaag

SEQ ID NO: 3540 - DNA, 23 bp, Homo sapiens
  source 1..23: mol_type = other DNA
tataataaaatcagtgataaggg

SEQ ID NO: 3541 - DNA, 23 bp, Homo sapiens
  source 1..23: mol_type = other DNA
tttaggacaacaaatgagtcagg

SEQ ID NO: 3542 - DNA, 23 bp, Homo sapiens
  source 1..23: mol_type = other DNA
taaaggaaaaccagaggttagag

SEQ ID NO: 3543 - DNA, 22 bp, Homo sapiens
  source 1..22: mol_type = other DNA
aacaggaaaaccagtgatatgc

SEQ ID NO: 3544 - DNA, 22 bp, Homo sapiens
  source 1..22: mol_type = other DNA
tataagaaaacaagtattcagg

SEQ ID NO: 3545 - DNA, 23 bp, Homo sapiens
  source 1..23: mol_type = other DNA
tgcaggaaaaccaggaaggcttg

SEQ ID NO: 3546 - DNA, 24 bp, Homo sapiens
  source 1..24: mol_type = other DNA
tctgggaaaaccagtggggtcctg

SEQ ID NO: 3547 - DNA, 22 bp, Homo sapiens
  source 1..22: mol_type = other DNA
tgtaggaaaacagttcatcagg

SEQ ID NO: 3548 - DNA, 23 bp, Homo sapiens
  source 1..23: mol_type = other DNA
tcatagagaaccagtgagccagg

SEQ ID NO: 3549 - DNA, 22 bp, Homo sapiens
  source 1..22: mol_type = other DNA
agtagaaaatccagtgagctgg

SEQ ID NO: 3550 - DNA, 22 bp, Homo sapiens
  source 1..22: mol_type = other DNA
agtaggaaaaccagtgctgagg

SEQ ID NO: 3551 - DNA, 22 bp, Homo sapiens
  source 1..22: mol_type = other DNA
tatggaaaaccaatgagcacgg

SEQ ID NO: 3552 - DNA, 23 bp, Homo sapiens
  source 1..23: mol_type = other DNA
aatgaggaaaacagtgggtcagg

SEQ ID NO: 3553 - DNA, 21 bp, Homo sapiens
  source 1..21: mol_type = other DNA
tgtaaaaaccactgagtatgg

SEQ ID NO: 3554 - DNA, 23 bp, Homo sapiens
  source 1..23: mol_type = other DNA
tataggaaatccagtgtgtaaga

SEQ ID NO: 3555 - DNA, 22 bp, Homo sapiens
  source 1..22: mol_type = other DNA
tataggaaaaccagatgccagg

SEQ ID NO: 3556 - DNA, 23 bp, Homo sapiens
  source 1..23: mol_type = other DNA
tgtaggaaaaccagagaaaggag

SEQ ID NO: 3557 - DNA, 23 bp, Homo sapiens
  source 1..23: mol_type = other DNA
agtaggaaaaacagtgacctagg

SEQ ID NO: 3558 - DNA, 23 bp, Homo sapiens
  source 1..23: mol_type = other DNA
tgcaggaaaaccagttaggaggc

SEQ ID NO: 3559 - DNA, 22 bp, Homo sapiens
  source 1..22: mol_type = other DNA
tattggagaccagtgagacagg

SEQ ID NO: 3560 - DNA, 21 bp, Homo sapiens
  source 1..21: mol_type = other DNA
tttagcaaccagagagtctgg

SEQ ID NO: 3561 - DNA, 23 bp, Homo sapiens
  source 1..23: mol_type = other DNA
gccaaggagaccagtgagtcagg

SEQ ID NO: 3562 - DNA, 22 bp, Homo sapiens
  source 1..22: mol_type = other DNA
tattggaagccagaaagtcagg

SEQ ID NO: 3563 - DNA, 23 bp, Homo sapiens
  source 1..23: mol_type = other DNA
taaaggcagagaagtgagttggg

SEQ ID NO: 3564 - DNA, 23 bp, Homo sapiens
  source 1..23: mol_type = other DNA
ctttggaaaccaagtgagtgtgg

SEQ ID NO: 3565 - DNA, 22 bp, Homo sapiens
  source 1..22: mol_type = other DNA
gatgagaaaaccatgactcagg

SEQ ID NO: 3566 - DNA, 23 bp, Homo sapiens
  source 1..23: mol_type = other DNA
gataggaataccagagggtgggg

SEQ ID NO: 3567 - DNA, 23 bp, Homo sapiens
  source 1..23: mol_type = other DNA
tgtagtaaaaccaataactcttg

SEQ ID NO: 3568 - DNA, 24 bp, Homo sapiens
  source 1..24: mol_type = other DNA
aataggaaataccagtgagttgtt

SEQ ID NO: 3569 - DNA, 24 bp, Homo sapiens
  source 1..24: mol_type = other DNA
tacagtaaaacccagtgatcctgg

SEQ ID NO: 3570 - DNA, 22 bp, Homo sapiens
  source 1..22: mol_type = other DNA
cataggaacccagtgactgggg

SEQ ID NO: 3571 - DNA, 21 bp, Homo sapiens
  source 1..21: mol_type = other DNA
tataggagctagtgattcggg

SEQ ID NO: 3572 - DNA, 24 bp, Homo sapiens
  source 1..24: mol_type = other DNA
tataggaaaacccagtaaatgtag

SEQ ID NO: 3573 - DNA, 22 bp, Homo sapiens
  source 1..22: mol_type = other DNA
ttcaggaaaaccagtggagtgg

SEQ ID NO: 3574 - DNA, 22 bp, Homo sapiens
  source 1..22: mol_type = other DNA
tgtaggaaaacatatgatcagg

SEQ ID NO: 3575 - DNA, 23 bp, Homo sapiens
  source 1..23: mol_type = other DNA
aataggataaccagtcagtaggg

SEQ ID NO: 3576 - DNA, 23 bp, Homo sapiens
  source 1..23: mol_type = other DNA
tatagtaaaaccagtgagaagag

SEQ ID NO: 3577 - DNA, 22 bp, Homo sapiens
  source 1..22: mol_type = other DNA
tgtaggaaaacagtaagtcaag

SEQ ID NO: 3578 - DNA, 24 bp, Homo sapiens
  source 1..24: mol_type = other DNA
aataggaaataccagtgaattgga

SEQ ID NO: 3579 - DNA, 22 bp, Homo sapiens
  source 1..22: mol_type = other DNA
cataggaagacagtgattctgg

SEQ ID NO: 3580 - DNA, 22 bp, Homo sapiens
  source 1..22: mol_type = other DNA
tataagagaaccatgagacagg

SEQ ID NO: 3581 - DNA, 22 bp, Homo sapiens
  source 1..22: mol_type = other DNA
agtagggaaaccaagagtcagg

SEQ ID NO: 3582 - DNA, 22 bp, Homo sapiens
  source 1..22: mol_type = other DNA
tgtaggaaactagtgagtcaga

SEQ ID NO: 3583 - DNA, 23 bp, Homo sapiens
  source 1..23: mol_type = other DNA
gggaggagaaccagtgagtagga

SEQ ID NO: 3584 - DNA, 23 bp, Homo sapiens
  source 1..23: mol_type = other DNA
cataggtaaaccagagagaaggg

SEQ ID NO: 3585 - DNA, 22 bp, Homo sapiens
  source 1..22: mol_type = other DNA
taaagaaaatcagtgagttgga

SEQ ID NO: 3586 - DNA, 23 bp, Homo sapiens
  source 1..23: mol_type = other DNA
aataagagaaccagtgattcaag

SEQ ID NO: 3587 - DNA, 23 bp, Homo sapiens
  source 1..23: mol_type = other DNA
tgtaaagaaaccactgagttggg

SEQ ID NO: 3588 - DNA, 22 bp, Homo sapiens
  source 1..22: mol_type = other DNA
gagaagaaaaccagtagtcagg

SEQ ID NO: 3589 - DNA, 22 bp, Homo sapiens
  source 1..22: mol_type = other DNA
tataaggacaccagtgatatgg

SEQ ID NO: 3590 - DNA, 22 bp, Homo sapiens
  source 1..22: mol_type = other DNA
tataagaaaccagtgaggtctg

SEQ ID NO: 3591 - DNA, 23 bp, Homo sapiens
  source 1..23: mol_type = other DNA
gataggaattgcagtgagtcagt

SEQ ID NO: 3592 - DNA, 22 bp, Homo sapiens
  source 1..22: mol_type = other DNA
tataggaaaccaatgagggctg

SEQ ID NO: 3593 - DNA, 23 bp, Homo sapiens
  source 1..23: mol_type = other DNA
tgtagagataccactgagtcaga

SEQ ID NO: 3594 - DNA, 22 bp, Homo sapiens
  source 1..22: mol_type = other DNA
tataggaaaatcatgtgtacag

SEQ ID NO: 3595 - DNA, 23 bp, Homo sapiens
  source 1..23: mol_type = other DNA
ttcagggaaaccagtgagtcata

SEQ ID NO: 3596 - DNA, 23 bp, Homo sapiens
  source 1..23: mol_type = other DNA
ccagggaaaatcagtaagtcagg

SEQ ID NO: 3597 - DNA, 22 bp, Homo sapiens
  source 1..22: mol_type = other DNA
agtaggaaaacaaagagtctgg

SEQ ID NO: 3598 - DNA, 22 bp, Homo sapiens
  source 1..22: mol_type = other DNA
tatatggatatcagtgagctgg

SEQ ID NO: 3599 - DNA, 22 bp, Homo sapiens
  source 1..22: mol_type = other DNA
tctagaaaaccagagagtcttg

SEQ ID NO: 3600 - DNA, 23 bp, Homo sapiens
  source 1..23: mol_type = other DNA
ttcagggaaaccagtgagtcagg

SEQ ID NO: 3601 - DNA, 23 bp, Homo sapiens
  source 1..23: mol_type = other DNA
ttctgaataaccagtgagtcaag

SEQ ID NO: 3602 - DNA, 23 bp, Homo sapiens
  source 1..23: mol_type = other DNA
aatatgtaaaccaatgagcctgg

SEQ ID NO: 3603 - DNA, 23 bp, Homo sapiens
  source 1..23: mol_type = other DNA
gttaggaaaaccagttaggagga

SEQ ID NO: 3604 - DNA, 21 bp, Homo sapiens
  source 1..21: mol_type = other DNA
tatagggaaatcagtgtcatg

SEQ ID NO: 3605 - DNA, 22 bp, Homo sapiens
  source 1..22: mol_type = other DNA
ttcagtaaaaccaatgatcagg

SEQ ID NO: 3606 - DNA, 22 bp, Homo sapiens
  source 1..22: mol_type = other DNA
catgggaaaaccatgaattagg

SEQ ID NO: 3607 - DNA, 22 bp, Homo sapiens
  source 1..22: mol_type = other DNA
tataggcactcagtgagtcgag

SEQ ID NO: 3608 - DNA, 22 bp, Homo sapiens
  source 1..22: mol_type = other DNA
aagaataaaaccatgagtctgg

SEQ ID NO: 3609 - DNA, 23 bp, Homo sapiens
  source 1..23: mol_type = other DNA
cataaggataccagtgagattgg

SEQ ID NO: 3610 - DNA, 21 bp, Homo sapiens
  source 1..21: mol_type = other DNA
tgtaagaaaaccagattccgg

SEQ ID NO: 3611 - DNA, 23 bp, Homo sapiens
  source 1..23: mol_type = other DNA
tgtagttaaaccagtggctgggg

SEQ ID NO: 3612 - DNA, 24 bp, Homo sapiens
  source 1..24: mol_type = other DNA
tatacataaaaccagtgaatgtgg

SEQ ID NO: 3613 - DNA, 23 bp, Homo sapiens
  source 1..23: mol_type = other DNA
ttgaggagaaccagtgagtttgg

SEQ ID NO: 3614 - DNA, 23 bp, Homo sapiens
  source 1..23: mol_type = other DNA
cataggaaagacagagagtgggt

SEQ ID NO: 3615 - DNA, 23 bp, Homo sapiens
  source 1..23: mol_type = other DNA
gtgaggaaaaccattgagccagg

SEQ ID NO: 3616 - DNA, 24 bp, Homo sapiens
  source 1..24: mol_type = other DNA
gtaaggaaaagcagtgaagtcagg

SEQ ID NO: 3617 - DNA, 21 bp, Homo sapiens
  source 1..21: mol_type = other DNA
tggaggaaccactgagtcagg

SEQ ID NO: 3618 - DNA, 23 bp, Homo sapiens
  source 1..23: mol_type = other DNA
cagtggtaaaccagtgagtggtg

SEQ ID NO: 3619 - DNA, 22 bp, Homo sapiens
  source 1..22: mol_type = other DNA
ggtagggagccagtgagtcagg

SEQ ID NO: 3620 - DNA, 22 bp, Homo sapiens
  source 1..22: mol_type = other DNA
aatagtataaccaggagtgtgg

SEQ ID NO: 3621 - DNA, 23 bp, Homo sapiens
  source 1..23: mol_type = other DNA
tagaggaaaaccagtaaatggca

SEQ ID NO: 3622 - DNA, 23 bp, Homo sapiens
  source 1..23: mol_type = other DNA
tttctttaaaccagtgagtctag

SEQ ID NO: 3623 - DNA, 23 bp, Homo sapiens
  source 1..23: mol_type = other DNA
tgtatgaaaaaccatgtgtcagg

SEQ ID NO: 3624 - DNA, 23 bp, Homo sapiens
  source 1..23: mol_type = other DNA
gatggaagaaccactgagtcagg

SEQ ID NO: 3625 - DNA, 24 bp, Homo sapiens
  source 1..24: mol_type = other DNA
cataggaataccaggtaactcagg

SEQ ID NO: 3626 - DNA, 24 bp, Homo sapiens
  source 1..24: mol_type = other DNA
gataggagaaaccagtgagggtgg

SEQ ID NO: 3627 - DNA, 23 bp, Homo sapiens
  source 1..23: mol_type = other DNA
tgtaggataaacagtgagctagt

SEQ ID NO: 3628 - DNA, 23 bp, Homo sapiens
  source 1..23: mol_type = other DNA
aaaatagaaacctgtgagtcagg

SEQ ID NO: 3629 - DNA, 22 bp, Homo sapiens
  source 1..22: mol_type = other DNA
tcttggaaaacagtgagtgctg

SEQ ID NO: 3630 - DNA, 23 bp, Homo sapiens
  source 1..23: mol_type = other DNA
ggcaggaaaaccagtggggtggg

SEQ ID NO: 3631 - DNA, 22 bp, Homo sapiens
  source 1..22: mol_type = other DNA
ggtgggaacaccagtgagcagg

SEQ ID NO: 3632 - DNA, 23 bp, Homo sapiens
  source 1..23: mol_type = other DNA
tataggaatgctagtgattttgg

SEQ ID NO: 3633 - DNA, 24 bp, Homo sapiens
  source 1..24: mol_type = other DNA
tatagaaaacccagtaaaatctgg

SEQ ID NO: 3634 - DNA, 23 bp, Homo sapiens
  source 1..23: mol_type = other DNA
gcttggaaaaccagtgagccact

SEQ ID NO: 3635 - DNA, 23 bp, Homo sapiens
  source 1..23: mol_type = other DNA
cataagaaaaccattgagtagtg

SEQ ID NO: 3636 - DNA, 21 bp, Homo sapiens
  source 1..21: mol_type = other DNA
tataagaatacctgagtctgg

SEQ ID NO: 3637 - DNA, 23 bp, Homo sapiens
  source 1..23: mol_type = other DNA
tataggaaaaccagagatactag

SEQ ID NO: 3638 - DNA, 23 bp, Homo sapiens
  source 1..23: mol_type = other DNA
ttcaaaaaaaccaatgagtccag

SEQ ID NO: 3639 - DNA, 23 bp, Homo sapiens
  source 1..23: mol_type = other DNA
tatagtagaaacagtgagtcatc

SEQ ID NO: 3640 - DNA, 21 bp, Homo sapiens
  source 1..21: mol_type = other DNA
tataggttaaccattgtcagg

SEQ ID NO: 3641 - DNA, 24 bp, Homo sapiens
  source 1..24: mol_type = other DNA
aaaagggaaatcagtgaggtctgg

SEQ ID NO: 3642 - DNA, 21 bp, Homo sapiens
  source 1..21: mol_type = other DNA
tgaagaaaccagtgagtcaga

SEQ ID NO: 3643 - DNA, 23 bp, Homo sapiens
  source 1..23: mol_type = other DNA
ggtggaagaaccactgagtcagg

SEQ ID NO: 3644 - DNA, 23 bp, Homo sapiens
  source 1..23: mol_type = other DNA
ctaagggaaaccagtaattcagg

SEQ ID NO: 3645 - DNA, 22 bp, Homo sapiens
  source 1..22: mol_type = other DNA
taaactaaaaccagtgttctgg

SEQ ID NO: 3646 - DNA, 23 bp, Homo sapiens
  source 1..23: mol_type = other DNA
tgatggaaaaccagtgagggaag

SEQ ID NO: 3647 - DNA, 23 bp, Homo sapiens
  source 1..23: mol_type = other DNA
ttttagaagaccagtgagtcagg

SEQ ID NO: 3648 - DNA, 23 bp, Homo sapiens
  source 1..23: mol_type = other DNA
taaaggaaagccagagagtgagg

SEQ ID NO: 3649 - DNA, 23 bp, Homo sapiens
  source 1..23: mol_type = other DNA
cacaagaaaaccagtgagtgaac

SEQ ID NO: 3650 - DNA, 23 bp, Homo sapiens
  source 1..23: mol_type = other DNA
tataggaataccactgagtgtgt

SEQ ID NO: 3651 - DNA, 23 bp, Homo sapiens
  source 1..23: mol_type = other DNA
tataggaatactagtgagttttg

SEQ ID NO: 3652 - DNA, 23 bp, Homo sapiens
  source 1..23: mol_type = other DNA
aataacaaaaccagtgagtcaat

SEQ ID NO: 3653 - DNA, 23 bp, Homo sapiens
  source 1..23: mol_type = other DNA
tataggaatgctagtgattcttg

SEQ ID NO: 3654 - DNA, 23 bp, Homo sapiens
  source 1..23: mol_type = other DNA
aataggaaaatcggtgacttaga

SEQ ID NO: 3655 - DNA, 22 bp, Homo sapiens
  source 1..22: mol_type = other DNA
tatttgagaaccagtagtcagg

SEQ ID NO: 3656 - DNA, 23 bp, Homo sapiens
  source 1..23: mol_type = other DNA
tataggaaatgcactgattcaat

SEQ ID NO: 3657 - DNA, 23 bp, Homo sapiens
  source 1..23: mol_type = other DNA
aataggaaaatcagtgagaaagc

SEQ ID NO: 3658 - DNA, 23 bp, Homo sapiens
  source 1..23: mol_type = other DNA
tcggggaaagccagtgagccagg

SEQ ID NO: 3659 - DNA, 23 bp, Homo sapiens
  source 1..23: mol_type = other DNA
tatacagacaccagtgagtcagt

SEQ ID NO: 3660 - DNA, 24 bp, Homo sapiens
  source 1..24: mol_type = other DNA
tgtaggaaataccagtaacacagg

SEQ ID NO: 3661 - DNA, 23 bp, Homo sapiens
  source 1..23: mol_type = other DNA
tataggaaaatcagagatcgtga

SEQ ID NO: 3662 - DNA, 23 bp, Homo sapiens
  source 1..23: mol_type = other DNA
tataggagggcctgtgagcctgg

SEQ ID NO: 3663 - DNA, 23 bp, Homo sapiens
  source 1..23: mol_type = other DNA
ggaatgaaaaccagtgattcatg

SEQ ID NO: 3664 - DNA, 23 bp, Homo sapiens
  source 1..23: mol_type = other DNA
ggaagaaggaccagtgagtcagg

SEQ ID NO: 3665 - DNA, 23 bp, Homo sapiens
  source 1..23: mol_type = other DNA
tataggaaagcttgtgatttttg

SEQ ID NO: 3666 - DNA, 23 bp, Homo sapiens
  source 1..23: mol_type = other DNA
taatggtgaaccagagagtcatg

SEQ ID NO: 3667 - DNA, 24 bp, Homo sapiens
  source 1..24: mol_type = other DNA
aatagaaataaccagtgattcaag

SEQ ID NO: 3668 - DNA, 22 bp, Homo sapiens
  source 1..22: mol_type = other DNA
aacaggtaaaccagtggccagg

SEQ ID NO: 3669 - DNA, 21 bp, Homo sapiens
  source 1..21: mol_type = other DNA
tgtaggaaacattgagtctga

SEQ ID NO: 3670 - DNA, 23 bp, Homo sapiens
  source 1..23: mol_type = other DNA
tatgggatcaccagtgattctat

SEQ ID NO: 3671 - DNA, 23 bp, Homo sapiens
  source 1..23: mol_type = other DNA
ggcaggaaaaccagtgattatga

SEQ ID NO: 3672 - DNA, 23 bp, Homo sapiens
  source 1..23: mol_type = other DNA
tataggaaaactagtgattttca

SEQ ID NO: 3673 - DNA, 23 bp, Homo sapiens
  source 1..23: mol_type = other DNA
acttgaaaaaccagtgggtcaag

SEQ ID NO: 3674 - DNA, 23 bp, Homo sapiens
  source 1..23: mol_type = other DNA
tataggaaaacaattgactttta

SEQ ID NO: 3675 - DNA, 23 bp, Homo sapiens
  source 1..23: mol_type = other DNA
tatataaaaaccagtgactagct

SEQ ID NO: 3676 - DNA, 23 bp, Homo sapiens
  source 1..23: mol_type = other DNA
aataggaaaatcaatgagttcag

SEQ ID NO: 3677 - DNA, 23 bp, Homo sapiens
  source 1..23: mol_type = other DNA
attaggaaaaccatgtagtatgg

SEQ ID NO: 3678 - DNA, 23 bp, Homo sapiens
  source 1..23: mol_type = other DNA
tctaggaaaaccggtgtctggga

SEQ ID NO: 3679 - DNA, 24 bp, Homo sapiens
  source 1..24: mol_type = other DNA
tagtagaaaaccagatgagtgtgg

SEQ ID NO: 3680 - DNA, 23 bp, Homo sapiens
  source 1..23: mol_type = other DNA
tataggaaaactagagaggatgg

SEQ ID NO: 3681 - DNA, 23 bp, Homo sapiens
  source 1..23: mol_type = other DNA
tatctggaaagcagtgagtatag

SEQ ID NO: 3682 - DNA, 23 bp, Homo sapiens
  source 1..23: mol_type = other DNA
tataggaatgcctgtgattttgg

SEQ ID NO: 3683 - DNA, 23 bp, Homo sapiens
  source 1..23: mol_type = other DNA
tatgagaaaactagtgagtggca

SEQ ID NO: 3684 - DNA, 23 bp, Homo sapiens
  source 1..23: mol_type = other DNA
tatagggaaatgagtgaatcagg

SEQ ID NO: 3685 - DNA, 22 bp, Homo sapiens
  source 1..22: mol_type = other DNA
tataggaaacaagtgagtgcaa

SEQ ID NO: 3686 - DNA, 22 bp, Homo sapiens
  source 1..22: mol_type = other DNA
tgaagggaaaccatgaatcagg

SEQ ID NO: 3687 - DNA, 22 bp, Homo sapiens
  source 1..22: mol_type = other DNA
aatagaagaaccagtggtgtgg

SEQ ID NO: 3688 - DNA, 23 bp, Homo sapiens
  source 1..23: mol_type = other DNA
tttatgataacctgggactctgg

SEQ ID NO: 3689 - DNA, 23 bp, Homo sapiens
  source 1..23: mol_type = other DNA
tatagaaaccccactgagtgagg

SEQ ID NO: 3690 - DNA, 23 bp, Homo sapiens
  source 1..23: mol_type = other DNA
gacagaaaaagctgagagtcagg

SEQ ID NO: 3691 - DNA, 23 bp, Homo sapiens
  source 1..23: mol_type = other DNA
tatagtagaaccagtttgtttgt

SEQ ID NO: 3692 - DNA, 23 bp, Homo sapiens
  source 1..23: mol_type = other DNA
tatatgagtaccagtgagctttg

SEQ ID NO: 3693 - DNA, 23 bp, Homo sapiens
  source 1..23: mol_type = other DNA
tagttgaaaagcagtgagctagg

SEQ ID NO: 3694 - DNA, 23 bp, Homo sapiens
  source 1..23: mol_type = other DNA
aatagaaacaccagggagtgctg

SEQ ID NO: 3695 - DNA, 25 bp, Homo sapiens
  source 1..25: mol_type = other DNA
cttaggaaaaccaccatgaatctgg

SEQ ID NO: 3696 - DNA, 22 bp, Homo sapiens
  source 1..22: mol_type = other DNA
tatagaaatcccatgagtctgg

SEQ ID NO: 3697 - DNA, 22 bp, Homo sapiens
  source 1..22: mol_type = other DNA
tataggaaaccagtgaaacctg

SEQ ID NO: 3698 - DNA, 22 bp, Homo sapiens
  source 1..22: mol_type = other DNA
tataggtaaacagtgtgtcatg

SEQ ID NO: 3699 - DNA, 22 bp, Homo sapiens
  source 1..22: mol_type = other DNA
tataggaaaacaggaattcagg

SEQ ID NO: 3700 - DNA, 21 bp, Homo sapiens
  source 1..21: mol_type = other DNA
gagaggaaaaacagtgacagg

SEQ ID NO: 3701 - DNA, 23 bp, Homo sapiens
  source 1..23: mol_type = other DNA
tatataataaccagtgaacatgg

SEQ ID NO: 3702 - DNA, 23 bp, Homo sapiens
  source 1..23: mol_type = other DNA
aatagtaaaatcagtgactattg

SEQ ID NO: 3703 - DNA, 23 bp, Homo sapiens
  source 1..23: mol_type = other DNA
attaggagacctagagagtcagg

SEQ ID NO: 3704 - DNA, 23 bp, Homo sapiens
  source 1..23: mol_type = other DNA
tataaggataccagtcagattgg

SEQ ID NO: 3705 - DNA, 23 bp, Homo sapiens
  source 1..23: mol_type = other DNA
tatagtaaaaggagaaattcagg

SEQ ID NO: 3706 - DNA, 23 bp, Homo sapiens
  source 1..23: mol_type = other DNA
tgtaggaaaaccattgaagaggt

SEQ ID NO: 3707 - DNA, 23 bp, Homo sapiens
  source 1..23: mol_type = other DNA
taaagcaaaaacagtgtttcatg

SEQ ID NO: 3708 - DNA, 23 bp, Homo sapiens
  source 1..23: mol_type = other DNA
tataggatagccagtaagtaata

SEQ ID NO: 3709 - DNA, 22 bp, Homo sapiens
  source 1..22: mol_type = other DNA
tgtggaaaaactgtgagtctgc

SEQ ID NO: 3710 - DNA, 22 bp, Homo sapiens
  source 1..22: mol_type = other DNA
tatacaaaaatagtgagtcagg

SEQ ID NO: 3711 - DNA, 22 bp, Homo sapiens
  source 1..22: mol_type = other DNA
tatagaatacatgtgagtgggg

SEQ ID NO: 3712 - DNA, 22 bp, Homo sapiens
  source 1..22: mol_type = other DNA
aataggaaaaacaggagaaagg

SEQ ID NO: 3713 - DNA, 22 bp, Homo sapiens
  source 1..22: mol_type = other DNA
aataagaaaaccagtagtctgt

SEQ ID NO: 3714 - DNA, 21 bp, Homo sapiens
  source 1..21: mol_type = other DNA
tatagtaaaacctgagaaagg

SEQ ID NO: 3715 - DNA, 21 bp, Homo sapiens
  source 1..21: mol_type = other DNA
tataggagtcagtgagtccag

SEQ ID NO: 3716 - DNA, 23 bp, Homo sapiens
  source 1..23: mol_type = other DNA
tatatgaaaaaccatgtgtcagg

SEQ ID NO: 3717 - DNA, 21 bp, Homo sapiens
  source 1..21: mol_type = other DNA
tgcaggaaagccagtgtctgg

SEQ ID NO: 3718 - DNA, 23 bp, Homo sapiens
  source 1..23: mol_type = other DNA
tatagataaaccagtgagaactt

SEQ ID NO: 3719 - DNA, 23 bp, Homo sapiens
  source 1..23: mol_type = other DNA
ttttaggagatcagtgagtcagg

SEQ ID NO: 3720 - DNA, 22 bp, Homo sapiens
  source 1..22: mol_type = other DNA
tttaggaataccatgactcagg

SEQ ID NO: 3721 - DNA, 23 bp, Homo sapiens
  source 1..23: mol_type = other DNA
tacaggaaaaccaaagagtctag

SEQ ID NO: 3722 - DNA, 23 bp, Homo sapiens
  source 1..23: mol_type = other DNA
tataggggcaccagtgaagttgg

SEQ ID NO: 3723 - DNA, 23 bp, Homo sapiens
  source 1..23: mol_type = other DNA
tataaggtgaccagtgagtctgc

SEQ ID NO: 3724 - DNA, 23 bp, Homo sapiens
  source 1..23: mol_type = other DNA
taaaagtaaaccagtgggtgggc

SEQ ID NO: 3725 - DNA, 23 bp, Homo sapiens
  source 1..23: mol_type = other DNA
tataacataaccaataggtcagg

SEQ ID NO: 3726 - DNA, 23 bp, Homo sapiens
  source 1..23: mol_type = other DNA
tactcacctctacatgctcagtg

SEQ ID NO: 3727 - DNA, 22 bp, Homo sapiens
  source 1..22: mol_type = other DNA
tactcaccctgcatacttctgg

SEQ ID NO: 3728 - DNA, 23 bp, Homo sapiens
  source 1..23: mol_type = other DNA
acctcaccactgcatgctctggg

SEQ ID NO: 3729 - DNA, 23 bp, Homo sapiens
  source 1..23: mol_type = other DNA
cactcatctctgcatattcatgg

SEQ ID NO: 3730 - DNA, 22 bp, Homo sapiens
  source 1..22: mol_type = other DNA
ctctcacctctcatactcaggg

SEQ ID NO: 3731 - DNA, 21 bp, Homo sapiens
  source 1..21: mol_type = other DNA
tactcacttgtatgctctagg

SEQ ID NO: 3732 - DNA, 23 bp, Homo sapiens
  source 1..23: mol_type = other DNA
ctctcacctccacatgcccgtgg

SEQ ID NO: 3733 - DNA, 23 bp, Homo sapiens
  source 1..23: mol_type = other DNA
ccctcacctccacatgttcaagg

SEQ ID NO: 3734 - DNA, 22 bp, Homo sapiens
  source 1..22: mol_type = other DNA
tactccatctgcatgttcacgg

SEQ ID NO: 3735 - DNA, 23 bp, Homo sapiens
  source 1..23: mol_type = other DNA
tcctcacctccacatgctccctg

SEQ ID NO: 3736 - DNA, 22 bp, Homo sapiens
  source 1..22: mol_type = other DNA
aactcaccctgcatctccaagg

SEQ ID NO: 3737 - DNA, 23 bp, Homo sapiens
  source 1..23: mol_type = other DNA
tctgtacctctgcatactccagg

SEQ ID NO: 3738 - DNA, 22 bp, Homo sapiens
  source 1..22: mol_type = other DNA
tgtttacctctgcatcccatgg

SEQ ID NO: 3739 - DNA, 24 bp, Homo sapiens
  source 1..24: mol_type = other DNA
acctcacctctaccatgcccaagg

SEQ ID NO: 3740 - DNA, 22 bp, Homo sapiens
  source 1..22: mol_type = other DNA
cacccaccctgcatactcagag

SEQ ID NO: 3741 - DNA, 23 bp, Homo sapiens
  source 1..23: mol_type = other DNA
tactcaaccccacttgctcaggg

SEQ ID NO: 3742 - DNA, 23 bp, Homo sapiens
  source 1..23: mol_type = other DNA
gacctcactctgcatgcccaagg

SEQ ID NO: 3743 - DNA, 23 bp, Homo sapiens
  source 1..23: mol_type = other DNA
ctttcacctctccatgctaatgg

SEQ ID NO: 3744 - DNA, 21 bp, Homo sapiens
  source 1..21: mol_type = other DNA
tactcaattacatgctcatgg

SEQ ID NO: 3745 - DNA, 22 bp, Homo sapiens
  source 1..22: mol_type = other DNA
taaccacctctgctgctcttgg

SEQ ID NO: 3746 - DNA, 22 bp, Homo sapiens
  source 1..22: mol_type = other DNA
tactctctaagcatgctcaagg

SEQ ID NO: 3747 - DNA, 23 bp, Homo sapiens
  source 1..23: mol_type = other DNA
tctttatttctgcatgctcaatg

SEQ ID NO: 3748 - DNA, 23 bp, Homo sapiens
  source 1..23: mol_type = other DNA
gcctttcatctgcatgctcacag

SEQ ID NO: 3749 - DNA, 23 bp, Homo sapiens
  source 1..23: mol_type = other DNA
cactctgatatgcatgctcttgg

SEQ ID NO: 3750 - DNA, 22 bp, Homo sapiens
  source 1..22: mol_type = other DNA
tttccacctctgcatctcgagg

SEQ ID NO: 3751 - DNA, 23 bp, Homo sapiens
  source 1..23: mol_type = other DNA
ttctgtactctgcatgctcagaa

SEQ ID NO: 3752 - DNA, 24 bp, Homo sapiens
  source 1..24: mol_type = other DNA
tactcacctctatcatgttcatgg

SEQ ID NO: 3753 - DNA, 22 bp, Homo sapiens
  source 1..22: mol_type = other DNA
tgctccatctgcatactcacag

SEQ ID NO: 3754 - DNA, 23 bp, Homo sapiens
  source 1..23: mol_type = other DNA
cagacacctcagcatgctcgtgg

SEQ ID NO: 3755 - DNA, 22 bp, Homo sapiens
  source 1..22: mol_type = other DNA
cacccacctcagcatctcagag

SEQ ID NO: 3756 - DNA, 22 bp, Homo sapiens
  source 1..22: mol_type = other DNA
tactccctctgcatgctcacgt

SEQ ID NO: 3757 - DNA, 21 bp, Homo sapiens
  source 1..21: mol_type = other DNA
tacccacctgcatgctagagg

SEQ ID NO: 3758 - DNA, 22 bp, Homo sapiens
  source 1..22: mol_type = other DNA
tgatacctctgcatgaacacgg

SEQ ID NO: 3759 - DNA, 22 bp, Homo sapiens
  source 1..22: mol_type = other DNA
ttatacctctgcatcctcatag

SEQ ID NO: 3760 - DNA, 22 bp, Homo sapiens
  source 1..22: mol_type = other DNA
caaccaccctgcatgctcttgg

SEQ ID NO: 3761 - DNA, 23 bp, Homo sapiens
  source 1..23: mol_type = other DNA
tactctcacttgcatgcttaggg

SEQ ID NO: 3762 - DNA, 24 bp, Homo sapiens
  source 1..24: mol_type = other DNA
taggcacatactgtatgctcatgg

SEQ ID NO: 3763 - DNA, 23 bp, Homo sapiens
  source 1..23: mol_type = other DNA
gtctctactctgcaggctcaggg

SEQ ID NO: 3764 - DNA, 22 bp, Homo sapiens
  source 1..22: mol_type = other DNA
taaacacatcccatgctcatgg

SEQ ID NO: 3765 - DNA, 22 bp, Homo sapiens
  source 1..22: mol_type = other DNA
tacacaccttacacgcccacgg

SEQ ID NO: 3766 - DNA, 24 bp, Homo sapiens
  source 1..24: mol_type = other DNA
tactcacctcagcaatgatcaggg

SEQ ID NO: 3767 - DNA, 23 bp, Homo sapiens
  source 1..23: mol_type = other DNA
ctcttacctttgcatgctcagtg

SEQ ID NO: 3768 - DNA, 22 bp, Homo sapiens
  source 1..22: mol_type = other DNA
ccctcacctctgcatttcctgg

SEQ ID NO: 3769 - DNA, 22 bp, Homo sapiens
  source 1..22: mol_type = other DNA
tacacaccctgcatggtaacgg

SEQ ID NO: 3770 - DNA, 23 bp, Homo sapiens
  source 1..23: mol_type = other DNA
caagcaccactgcaggctcaggg

SEQ ID NO: 3771 - DNA, 21 bp, Homo sapiens
  source 1..21: mol_type = other DNA
tacacttcaacatgctcatgg

SEQ ID NO: 3772 - DNA, 23 bp, Homo sapiens
  source 1..23: mol_type = other DNA
ttctcacccctacatgttcttgg

SEQ ID NO: 3773 - DNA, 22 bp, Homo sapiens
  source 1..22: mol_type = other DNA
cacttaacctgcatgcttaagg

SEQ ID NO: 3774 - DNA, 22 bp, Homo sapiens
  source 1..22: mol_type = other DNA
gaaacacatctcatgctcatgg

SEQ ID NO: 3775 - DNA, 23 bp, Homo sapiens
  source 1..23: mol_type = other DNA
cactactctcaccatgctcaagg

SEQ ID NO: 3776 - DNA, 22 bp, Homo sapiens
  source 1..22: mol_type = other DNA
gactcacccttcatgcccaagg

SEQ ID NO: 3777 - DNA, 22 bp, Homo sapiens
  source 1..22: mol_type = other DNA
ttctcaccctgtattctcatgg

SEQ ID NO: 3778 - DNA, 23 bp, Homo sapiens
  source 1..23: mol_type = other DNA
tcctcacctctgcattcagtggc

SEQ ID NO: 3779 - DNA, 23 bp, Homo sapiens
  source 1..23: mol_type = other DNA
gcctcatctctgcaagctcaggg

SEQ ID NO: 3780 - DNA, 21 bp, Homo sapiens
  source 1..21: mol_type = other DNA
gaatcatctacatgctcaggg

SEQ ID NO: 3781 - DNA, 23 bp, Homo sapiens
  source 1..23: mol_type = other DNA
accacaactcagcatgctcaggg

SEQ ID NO: 3782 - DNA, 23 bp, Homo sapiens
  source 1..23: mol_type = other DNA
tgcacacacacgcatgctcatgg

SEQ ID NO: 3783 - DNA, 23 bp, Homo sapiens
  source 1..23: mol_type = other DNA
agctcagctctgcaagctcatgg

SEQ ID NO: 3784 - DNA, 22 bp, Homo sapiens
  source 1..22: mol_type = other DNA
caccaccccagcatgcccaggg

SEQ ID NO: 3785 - DNA, 22 bp, Homo sapiens
  source 1..22: mol_type = other DNA
gaataccttggcatgctcaagg

SEQ ID NO: 3786 - DNA, 23 bp, Homo sapiens
  source 1..23: mol_type = other DNA
ttataaacactgcatgctcaggc

SEQ ID NO: 3787 - DNA, 22 bp, Homo sapiens
  source 1..22: mol_type = other DNA
gactaacattccatgctcacgg

SEQ ID NO: 3788 - DNA, 24 bp, Homo sapiens
  source 1..24: mol_type = other DNA
tactctaccgttgcatgccctggg

SEQ ID NO: 3789 - DNA, 23 bp, Homo sapiens
  source 1..23: mol_type = other DNA
tacacacctatgtatgctcatgc

SEQ ID NO: 3790 - DNA, 23 bp, Homo sapiens
  source 1..23: mol_type = other DNA
caccaacatatgcatgcccacgg

SEQ ID NO: 3791 - DNA, 22 bp, Homo sapiens
  source 1..22: mol_type = other DNA
tctacacttctgctgctcatgg

SEQ ID NO: 3792 - DNA, 22 bp, Homo sapiens
  source 1..22: mol_type = other DNA
ttatcatctctgcatctccggg

SEQ ID NO: 3793 - DNA, 23 bp, Homo sapiens
  source 1..23: mol_type = other DNA
tatacatatctgcatgctcattt

SEQ ID NO: 3794 - DNA, 23 bp, Homo sapiens
  source 1..23: mol_type = other DNA
ttcttccatctgcatgctttggg

SEQ ID NO: 3795 - DNA, 22 bp, Homo sapiens
  source 1..22: mol_type = other DNA
atctcacatctcatgttcatgg

SEQ ID NO: 3796 - DNA, 23 bp, Homo sapiens
  source 1..23: mol_type = other DNA
tgttcacctctgcatctccaaga

SEQ ID NO: 3797 - DNA, 22 bp, Homo sapiens
  source 1..22: mol_type = other DNA
aactcagctctgcatcacatgg

SEQ ID NO: 3798 - DNA, 23 bp, Homo sapiens
  source 1..23: mol_type = other DNA
tgctcaccactgcatgccactag

SEQ ID NO: 3799 - DNA, 23 bp, Homo sapiens
  source 1..23: mol_type = other DNA
tattcacctctgcatcccacatg

SEQ ID NO: 3800 - DNA, 21 bp, Homo sapiens
  source 1..21: mol_type = other DNA
tgctcatctccatgcccaggg

SEQ ID NO: 3801 - DNA, 23 bp, Homo sapiens
  source 1..23: mol_type = other DNA
taatttcctctgcatactcctgg

SEQ ID NO: 3802 - DNA, 23 bp, Homo sapiens
  source 1..23: mol_type = other DNA
tgatgttctctgcatgctccagg

SEQ ID NO: 3803 - DNA, 24 bp, Homo sapiens
  source 1..24: mol_type = other DNA
tgcaaagcctctgcatgctccagg

SEQ ID NO: 3804 - DNA, 22 bp, Homo sapiens
  source 1..22: mol_type = other DNA
tccgaaccctgcatgctcagag

SEQ ID NO: 3805 - DNA, 22 bp, Homo sapiens
  source 1..22: mol_type = other DNA
tcttgaccttgcatgctcatgg

SEQ ID NO: 3806 - DNA, 22 bp, Homo sapiens
  source 1..22: mol_type = other DNA
gaaaaaccttgcatgctcatgg

SEQ ID NO: 3807 - DNA, 23 bp, Homo sapiens
  source 1..23: mol_type = other DNA
tttgatcctttgcatgctcaggg

SEQ ID NO: 3808 - DNA, 21 bp, Homo sapiens
  source 1..21: mol_type = other DNA
ttcttacctgtatgctcaggg

SEQ ID NO: 3809 - DNA, 21 bp, Homo sapiens
  source 1..21: mol_type = other DNA
gactcctcagcatgctcagtg

SEQ ID NO: 3810 - DNA, 23 bp, Homo sapiens
  source 1..23: mol_type = other DNA
cagtgaactctgcatactccagg

SEQ ID NO: 3811 - DNA, 23 bp, Homo sapiens
  source 1..23: mol_type = other DNA
tgttggccactgcaagctcaggg

SEQ ID NO: 3812 - DNA, 21 bp, Homo sapiens
  source 1..21: mol_type = other DNA
tactcaactgtaagctcaagg

SEQ ID NO: 3813 - DNA, 23 bp, Homo sapiens
  source 1..23: mol_type = other DNA
ccctcagtgctgcatgctccagg

SEQ ID NO: 3814 - DNA, 24 bp, Homo sapiens
  source 1..24: mol_type = other DNA
tactactctcgtacatgctcaggg

SEQ ID NO: 3815 - DNA, 23 bp, Homo sapiens
  source 1..23: mol_type = other DNA
catacacctttgcatgctcaggt

SEQ ID NO: 3816 - DNA, 23 bp, Homo sapiens
  source 1..23: mol_type = other DNA
ttctcacctctacatcttcttgg

SEQ ID NO: 3817 - DNA, 23 bp, Homo sapiens
  source 1..23: mol_type = other DNA
ctgtcaccactgtatcctcaggg

SEQ ID NO: 3818 - DNA, 23 bp, Homo sapiens
  source 1..23: mol_type = other DNA
ccctgacctctgcatcctcaggg

SEQ ID NO: 3819 - DNA, 21 bp, Homo sapiens
  source 1..21: mol_type = other DNA
tcctcatctccatgctcagag

SEQ ID NO: 3820 - DNA, 23 bp, Homo sapiens
  source 1..23: mol_type = other DNA
tagtcacctctgcatgttaaagt

SEQ ID NO: 3821 - DNA, 24 bp, Homo sapiens
  source 1..24: mol_type = other DNA
tcatcacctctaacatgctcaagg

SEQ ID NO: 3822 - DNA, 22 bp, Homo sapiens
  source 1..22: mol_type = other DNA
tcttcatctctgcatcccatgg

SEQ ID NO: 3823 - DNA, 23 bp, Homo sapiens
  source 1..23: mol_type = other DNA
cacccacctctgcatgctggaga

SEQ ID NO: 3824 - DNA, 23 bp, Homo sapiens
  source 1..23: mol_type = other DNA
aaattgactatgcatgctcaggg

SEQ ID NO: 3825 - DNA, 22 bp, Homo sapiens
  source 1..22: mol_type = other DNA
aaatgacatctcatgctcatgg

SEQ ID NO: 3826 - DNA, 22 bp, Homo sapiens
  source 1..22: mol_type = other DNA
tcccaaccttgcatgcccaggg

SEQ ID NO: 3827 - DNA, 22 bp, Homo sapiens
  source 1..22: mol_type = other DNA
tacacaccacacatgctcatgc

SEQ ID NO: 3828 - DNA, 23 bp, Homo sapiens
  source 1..23: mol_type = other DNA
tacgcaccactgcaggctctgag

SEQ ID NO: 3829 - DNA, 23 bp, Homo sapiens
  source 1..23: mol_type = other DNA
tacagatatgtgcatgctcaggg

SEQ ID NO: 3830 - DNA, 23 bp, Homo sapiens
  source 1..23: mol_type = other DNA
cactcacctcaccaggctctagg

SEQ ID NO: 3831 - DNA, 22 bp, Homo sapiens
  source 1..22: mol_type = other DNA
ttcacacatctgctgctctagg

SEQ ID NO: 3832 - DNA, 23 bp, Homo sapiens
  source 1..23: mol_type = other DNA
tacaggcatgtgcaagctcatgg

SEQ ID NO: 3833 - DNA, 23 bp, Homo sapiens
  source 1..23: mol_type = other DNA
taaaaaacacttcatgctcatgg

SEQ ID NO: 3834 - DNA, 23 bp, Homo sapiens
  source 1..23: mol_type = other DNA
tccactcctctgcatgctctttc

SEQ ID NO: 3835 - DNA, 24 bp, Homo sapiens
  source 1..24: mol_type = other DNA
tattcacctctgcagtgctctgag

SEQ ID NO: 3836 - DNA, 23 bp, Homo sapiens
  source 1..23: mol_type = other DNA
tactgacttctacaagctcacaa

SEQ ID NO: 3837 - DNA, 23 bp, Homo sapiens
  source 1..23: mol_type = other DNA
tactctcttgtgcatgcacacga

SEQ ID NO: 3838 - DNA, 23 bp, Homo sapiens
  source 1..23: mol_type = other DNA
aactcacccctgcctggtccatg

SEQ ID NO: 3839 - DNA, 22 bp, Homo sapiens
  source 1..22: mol_type = other DNA
gtctcaccacagatgctcaagg

SEQ ID NO: 3840 - DNA, 23 bp, Homo sapiens
  source 1..23: mol_type = other DNA
gactcagccctgcatgtgcaggg

SEQ ID NO: 3841 - DNA, 23 bp, Homo sapiens
  source 1..23: mol_type = other DNA
ccctaatcactgcaggctcaggg

SEQ ID NO: 3842 - DNA, 23 bp, Homo sapiens
  source 1..23: mol_type = other DNA
cagttacctctgcatgccctgag

SEQ ID NO: 3843 - DNA, 23 bp, Homo sapiens
  source 1..23: mol_type = other DNA
taatcatctctgcatgaacagtt

SEQ ID NO: 3844 - DNA, 23 bp, Homo sapiens
  source 1..23: mol_type = other DNA
tgcccacctctgcaacctctcgg

SEQ ID NO: 3845 - DNA, 24 bp, Homo sapiens
  source 1..24: mol_type = other DNA
tcagcaccttctccatgctcatgg

SEQ ID NO: 3846 - DNA, 24 bp, Homo sapiens
  source 1..24: mol_type = other DNA
tcatcacctctgctgtgctctagg

SEQ ID NO: 3847 - DNA, 22 bp, Homo sapiens
  source 1..22: mol_type = other DNA
ggctcaccctgcaggctctagg

SEQ ID NO: 3848 - DNA, 22 bp, Homo sapiens
  source 1..22: mol_type = other DNA
tactcagccagaatgctcagcg

SEQ ID NO: 3849 - DNA, 22 bp, Homo sapiens
  source 1..22: mol_type = other DNA
taccacctatgtttgctcaagg

SEQ ID NO: 3850 - DNA, 23 bp, Homo sapiens
  source 1..23: mol_type = other DNA
cactcaccacagctggcacaggg

SEQ ID NO: 3851 - DNA, 22 bp, Homo sapiens
  source 1..22: mol_type = other DNA
ttccacctctggatgcccatag

SEQ ID NO: 3852 - DNA, 22 bp, Homo sapiens
  source 1..22: mol_type = other DNA
tgctcaccctctatgctcaggg

SEQ ID NO: 3853 - DNA, 22 bp, Homo sapiens
  source 1..22: mol_type = other DNA
tactcacattgcatgtgtatgg

SEQ ID NO: 3854 - DNA, 22 bp, Homo sapiens
  source 1..22: mol_type = other DNA
tactacctctgcatgtctatag

SEQ ID NO: 3855 - DNA, 22 bp, Homo sapiens
  source 1..22: mol_type = other DNA
ttattacccctgcagctcaggg

SEQ ID NO: 3856 - DNA, 22 bp, Homo sapiens
  source 1..22: mol_type = other DNA
cgctcacctctgcataccatag

SEQ ID NO: 3857 - DNA, 23 bp, Homo sapiens
  source 1..23: mol_type = other DNA
aactctgctatgcatgcccaaga

SEQ ID NO: 3858 - DNA, 23 bp, Homo sapiens
  source 1..23: mol_type = other DNA
cattcacatcagcatgttcatgc

SEQ ID NO: 3859 - DNA, 23 bp, Homo sapiens
  source 1..23: mol_type = other DNA
taatcacccctatatgctcatag

SEQ ID NO: 3860 - DNA, 22 bp, Homo sapiens
  source 1..22: mol_type = other DNA
taaacacattccatgctcatgg

SEQ ID NO: 3861 - DNA, 23 bp, Homo sapiens
  source 1..23: mol_type = other DNA
tgcacacacatgcatgcacatgg

SEQ ID NO: 3862 - DNA, 23 bp, Homo sapiens
  source 1..23: mol_type = other DNA
tactcacctcttcaagcccccac

SEQ ID NO: 3863 - DNA, 23 bp, Homo sapiens
  source 1..23: mol_type = other DNA
caagcacctctgccagctccagg

SEQ ID NO: 3864 - DNA, 23 bp, Homo sapiens
  source 1..23: mol_type = other DNA
gactcacccctgcctgcttctgg

SEQ ID NO: 3865 - DNA, 22 bp, Homo sapiens
  source 1..22: mol_type = other DNA
aactcatctctgctgctctctg

SEQ ID NO: 3866 - DNA, 23 bp, Homo sapiens
  source 1..23: mol_type = other DNA
tcctcatatatacaggctcacgg

SEQ ID NO: 3867 - DNA, 23 bp, Homo sapiens
  source 1..23: mol_type = other DNA
tattcatctttgcattcccagag

SEQ ID NO: 3868 - DNA, 23 bp, Homo sapiens
  source 1..23: mol_type = other DNA
tccttagctctgcatgccccggc

SEQ ID NO: 3869 - DNA, 22 bp, Homo sapiens
  source 1..22: mol_type = other DNA
tgctcacctcccaagcacaagg

SEQ ID NO: 3870 - DNA, 22 bp, Homo sapiens
  source 1..22: mol_type = other DNA
tacccacccctgcagctttggg

SEQ ID NO: 3871 - DNA, 22 bp, Homo sapiens
  source 1..22: mol_type = other DNA
tagtcaccacagcctgccatgg

SEQ ID NO: 3872 - DNA, 22 bp, Homo sapiens
  source 1..22: mol_type = other DNA
atcacacctctgcaggctaggg

SEQ ID NO: 3873 - DNA, 21 bp, Homo sapiens
  source 1..21: mol_type = other DNA
tactcaccttccagctcaggg

SEQ ID NO: 3874 - DNA, 23 bp, Homo sapiens
  source 1..23: mol_type = other DNA
tactcccctaagctggctcctgg

SEQ ID NO: 3875 - DNA, 23 bp, Homo sapiens
  source 1..23: mol_type = other DNA
cattcacctctgcctgccctttg

SEQ ID NO: 3876 - DNA, 23 bp, Homo sapiens
  source 1..23: mol_type = other DNA
cacccacctcagccttctgaagg

SEQ ID NO: 3877 - DNA, 23 bp, Homo sapiens
  source 1..23: mol_type = other DNA
tattcatctctgcgtacccagtg

SEQ ID NO: 3878 - DNA, 22 bp, Homo sapiens
  source 1..22: mol_type = other DNA
taaacacccctgctgctccagg

SEQ ID NO: 3879 - DNA, 22 bp, Homo sapiens
  source 1..22: mol_type = other DNA
ttctcacctgttcatgtcatgg

SEQ ID NO: 3880 - DNA, 21 bp, Homo sapiens
  source 1..21: mol_type = other DNA
ttatcacctcagcattcatgg

SEQ ID NO: 3881 - DNA, 22 bp, Homo sapiens
  source 1..22: mol_type = other DNA
ctctaacctctgatgcacaggg

SEQ ID NO: 3882 - DNA, 21 bp, Homo sapiens
  source 1..21: mol_type = other DNA
ttctcacctgcatgctcataa

SEQ ID NO: 3883 - DNA, 23 bp, Homo sapiens
  source 1..23: mol_type = other DNA
tacagacttccgcatgcttactg

SEQ ID NO: 3884 - DNA, 23 bp, Homo sapiens
  source 1..23: mol_type = other DNA
tactctcctccacattctctcag

SEQ ID NO: 3885 - DNA, 23 bp, Homo sapiens
  source 1..23: mol_type = other DNA
aactcatctcggcatacccagtg

SEQ ID NO: 3886 - DNA, 23 bp, Homo sapiens
  source 1..23: mol_type = other DNA
tccttacctctccatgctatggt

SEQ ID NO: 3887 - DNA, 24 bp, Homo sapiens
  source 1..24: mol_type = other DNA
gactaagcccctgcaggctcaggg

SEQ ID NO: 3888 - DNA, 25 bp, Homo sapiens
  source 1..25: mol_type = other DNA
tccacacctccctgcaagctgaggg

SEQ ID NO: 3889 - DNA, 22 bp, Homo sapiens
  source 1..22: mol_type = other DNA
aactcacccctgctgattaggg

SEQ ID NO: 3890 - DNA, 22 bp, Homo sapiens
  source 1..22: mol_type = other DNA
tacgacctatgtttgctcaagg

SEQ ID NO: 3891 - DNA, 22 bp, Homo sapiens
  source 1..22: mol_type = other DNA
tactcagctctgctgatgagga

SEQ ID NO: 3892 - DNA, 23 bp, Homo sapiens
  source 1..23: mol_type = other DNA
tattcacctctgcacccccatcc

SEQ ID NO: 3893 - DNA, 23 bp, Homo sapiens
  source 1..23: mol_type = other DNA
tacttactccttcatgggcaagg

SEQ ID NO: 3894 - DNA, 22 bp, Homo sapiens
  source 1..22: mol_type = other DNA
tagtcacttctcccgctcaggg

SEQ ID NO: 3895 - DNA, 21 bp, Homo sapiens
  source 1..21: mol_type = other DNA
tactcatctatgcatgcattg

SEQ ID NO: 3896 - DNA, 24 bp, Homo sapiens
  source 1..24: mol_type = other DNA
tactcacacaccacatgctcacag

SEQ ID NO: 3897 - DNA, 22 bp, Homo sapiens
  source 1..22: mol_type = other DNA
tgctcaccctgcatgctcagtg

SEQ ID NO: 3898 - DNA, 22 bp, Homo sapiens
  source 1..22: mol_type = other DNA
tactacctatgcatgcccaagg

SEQ ID NO: 3899 - DNA, 23 bp, Homo sapiens
  source 1..23: mol_type = other DNA
tactcaccacagcatgtccaggg

SEQ ID NO: 3900 - DNA, 22 bp, Homo sapiens
  source 1..22: mol_type = other DNA
cactcatctcccatgctcaggg

SEQ ID NO: 3901 - DNA, 22 bp, Homo sapiens
  source 1..22: mol_type = other DNA
ccttcacctctgcatgtcaaga

SEQ ID NO: 3902 - DNA, 21 bp, Homo sapiens
  source 1..21: mol_type = other DNA
tactcaccagcatgatcatgg

SEQ ID NO: 3903 - DNA, 22 bp, Homo sapiens
  source 1..22: mol_type = other DNA
tatatacctctgctgttcaagg

SEQ ID NO: 3904 - DNA, 23 bp, Homo sapiens
  source 1..23: mol_type = other DNA
atgtctactctgcatgctcttgg

SEQ ID NO: 3905 - DNA, 23 bp, Homo sapiens
  source 1..23: mol_type = other DNA
tactcacacatgcatactcaaga

SEQ ID NO: 3906 - DNA, 23 bp, Homo sapiens
  source 1..23: mol_type = other DNA
catacacatctgcatgctcatgg

SEQ ID NO: 3907 - DNA, 22 bp, Homo sapiens
  source 1..22: mol_type = other DNA
aactcaccctgtatgctatagg

SEQ ID NO: 3908 - DNA, 23 bp, Homo sapiens
  source 1..23: mol_type = other DNA
tcataatatttgcatgctcaggg

SEQ ID NO: 3909 - DNA, 22 bp, Homo sapiens
  source 1..22: mol_type = other DNA
tactcactctccatgttcttgg

SEQ ID NO: 3910 - DNA, 23 bp, Homo sapiens
  source 1..23: mol_type = other DNA
tggccacctatgcatgttcaagg

SEQ ID NO: 3911 - DNA, 23 bp, Homo sapiens
  source 1..23: mol_type = other DNA
tatcttctactgcatgctcatgg

SEQ ID NO: 3912 - DNA, 22 bp, Homo sapiens
  source 1..22: mol_type = other DNA
ttttcacctctgctgctctttg

SEQ ID NO: 3913 - DNA, 23 bp, Homo sapiens
  source 1..23: mol_type = other DNA
tccacaccactgcatgcaccagg

SEQ ID NO: 3914 - DNA, 23 bp, Homo sapiens
  source 1..23: mol_type = other DNA
tacacattcatgcatgctcagag

SEQ ID NO: 3915 - DNA, 22 bp, Homo sapiens
  source 1..22: mol_type = other DNA
gaaacacctctcatgctcatgg

SEQ ID NO: 3916 - DNA, 23 bp, Homo sapiens
  source 1..23: mol_type = other DNA
gcctcacctctgcataatcatgg

SEQ ID NO: 3917 - DNA, 23 bp, Homo sapiens
  source 1..23: mol_type = other DNA
ttttcttatctgcatgctccagg

SEQ ID NO: 3918 - DNA, 22 bp, Homo sapiens
  source 1..22: mol_type = other DNA
tactcagtttacatgcttaggg

SEQ ID NO: 3919 - DNA, 23 bp, Homo sapiens
  source 1..23: mol_type = other DNA
tccttaatactgcatgctgaggg

SEQ ID NO: 3920 - DNA, 22 bp, Homo sapiens
  source 1..22: mol_type = other DNA
ggctcacctctgcagctcttag

SEQ ID NO: 3921 - DNA, 23 bp, Homo sapiens
  source 1..23: mol_type = other DNA
tatgatcctctgcatgctcaaag

SEQ ID NO: 3922 - DNA, 23 bp, Homo sapiens
  source 1..23: mol_type = other DNA
cacgcacctatacatgctcatga

SEQ ID NO: 3923 - DNA, 23 bp, Homo sapiens
  source 1..23: mol_type = other DNA
cactcacctcagcctgctccatg

SEQ ID NO: 3924 - DNA, 22 bp, Homo sapiens
  source 1..22: mol_type = other DNA
tattcatctctgcatcccaggg

SEQ ID NO: 3925 - DNA, 21 bp, Homo sapiens
  source 1..21: mol_type = other DNA
tactcacctctgcactaatgg

SEQ ID NO: 3926 - DNA, 23 bp, Homo sapiens
  source 1..23: mol_type = other DNA
tacttacacatgcatgcttacag

SEQ ID NO: 3927 - DNA, 22 bp, Homo sapiens
  source 1..22: mol_type = other DNA
ttcccactctgcatgctccttg

SEQ ID NO: 3928 - DNA, 23 bp, Homo sapiens
  source 1..23: mol_type = other DNA
tactctcccctgcatgctctgag

SEQ ID NO: 3929 - DNA, 23 bp, Homo sapiens
  source 1..23: mol_type = other DNA
ccatcacccctgcatggtcaggg

SEQ ID NO: 3930 - DNA, 21 bp, Homo sapiens
  source 1..21: mol_type = other DNA
taaacatctacatgctcatgg

SEQ ID NO: 3931 - DNA, 23 bp, Homo sapiens
  source 1..23: mol_type = other DNA
taatcattaatgcatgctctagg

SEQ ID NO: 3932 - DNA, 22 bp, Homo sapiens
  source 1..22: mol_type = other DNA
tctccacctctgcagcccatgg

SEQ ID NO: 3933 - DNA, 22 bp, Homo sapiens
  source 1..22: mol_type = other DNA
gaaacacctcccatgctcaggg

SEQ ID NO: 3934 - DNA, 22 bp, Homo sapiens
  source 1..22: mol_type = other DNA
acctcatcctgcatgcttaagg

SEQ ID NO: 3935 - DNA, 22 bp, Homo sapiens
  source 1..22: mol_type = other DNA
ccctcccactgcatgctcgtgg

SEQ ID NO: 3936 - DNA, 23 bp, Homo sapiens
  source 1..23: mol_type = other DNA
gggtgacatctgtatgctcatgg

SEQ ID NO: 3937 - DNA, 21 bp, Homo sapiens
  source 1..21: mol_type = other DNA
tcctcatctgcatgctctggc

SEQ ID NO: 3938 - DNA, 23 bp, Homo sapiens
  source 1..23: mol_type = other DNA
cacacacacctgcatgcttatgg

SEQ ID NO: 3939 - DNA, 22 bp, Homo sapiens
  source 1..22: mol_type = other DNA
tactccccaggcatgctcatgg

SEQ ID NO: 3940 - DNA, 23 bp, Homo sapiens
  source 1..23: mol_type = other DNA
aagccccatctgcatgctcaggc

SEQ ID NO: 3941 - DNA, 23 bp, Homo sapiens
  source 1..23: mol_type = other DNA
gaatatcctttgcatgctcacgg

SEQ ID NO: 3942 - DNA, 22 bp, Homo sapiens
  source 1..22: mol_type = other DNA
aagtcaccactgctgctcatgg

SEQ ID NO: 3943 - DNA, 22 bp, Homo sapiens
  source 1..22: mol_type = other DNA
tggacaccactgcagctcaagg

SEQ ID NO: 3944 - DNA, 24 bp, Homo sapiens
  source 1..24: mol_type = other DNA
tgctaacttactgcatgcttaggg

SEQ ID NO: 3945 - DNA, 23 bp, Homo sapiens
  source 1..23: mol_type = other DNA
tatttgcatatgcatgttcatgg

SEQ ID NO: 3946 - DNA, 22 bp, Homo sapiens
  source 1..22: mol_type = other DNA
tactctacctggatgctcacag

SEQ ID NO: 3947 - DNA, 22 bp, Homo sapiens
  source 1..22: mol_type = other DNA
tgcccaccctgcatgctcactg

SEQ ID NO: 3948 - DNA, 23 bp, Homo sapiens
  source 1..23: mol_type = other DNA
agagcacctcaccatgctcaggg

SEQ ID NO: 3949 - DNA, 22 bp, Homo sapiens
  source 1..22: mol_type = other DNA
cactctctctgcaagctctagg

SEQ ID NO: 3950 - DNA, 23 bp, Homo sapiens
  source 1..23: mol_type = other DNA
tggtcacctctgtatactcaggg

SEQ ID NO: 3951 - DNA, 23 bp, Homo sapiens
  source 1..23: mol_type = other DNA
ccctcactactgcatgctcaggt

SEQ ID NO: 3952 - DNA, 22 bp, Homo sapiens
  source 1..22: mol_type = other DNA
ttgtcacccagcatgctcaatg

SEQ ID NO: 3953 - DNA, 23 bp, Homo sapiens
  source 1..23: mol_type = other DNA
cacacacctctgcacgctcggag

SEQ ID NO: 3954 - DNA, 22 bp, Homo sapiens
  source 1..22: mol_type = other DNA
ctgtcacctctcaagctcacgg

SEQ ID NO: 3955 - DNA, 22 bp, Homo sapiens
  source 1..22: mol_type = other DNA
tccataccctgcttgctcaggg

SEQ ID NO: 3956 - DNA, 23 bp, Homo sapiens
  source 1..23: mol_type = other DNA
tcctatcatctgcatgctcaaca

SEQ ID NO: 3957 - DNA, 23 bp, Homo sapiens
  source 1..23: mol_type = other DNA
tacacacacatgcatgctcatgc

SEQ ID NO: 3958 - DNA, 21 bp, Homo sapiens
  source 1..21: mol_type = other DNA
cattcacctgcatgctcaaag

SEQ ID NO: 3959 - DNA, 23 bp, Homo sapiens
  source 1..23: mol_type = other DNA
ttgtcacctctgcctgctctgag

SEQ ID NO: 3960 - DNA, 22 bp, Homo sapiens
  source 1..22: mol_type = other DNA
tcctcacctctcacgctccagg

SEQ ID NO: 3961 - DNA, 22 bp, Homo sapiens
  source 1..22: mol_type = other DNA
tactcacactgcatgcacaata

SEQ ID NO: 3962 - DNA, 23 bp, Homo sapiens
  source 1..23: mol_type = other DNA
taatgctgactgcatgctcatgg

SEQ ID NO: 3963 - DNA, 23 bp, Homo sapiens
  source 1..23: mol_type = other DNA
tcttcccatctgcatgttcaaag

SEQ ID NO: 3964 - DNA, 23 bp, Homo sapiens
  source 1..23: mol_type = other DNA
tcctttaatttgcatgctcaagg

SEQ ID NO: 3965 - DNA, 22 bp, Homo sapiens
  source 1..22: mol_type = other DNA
tacactactctgcatctcagtg

SEQ ID NO: 3966 - DNA, 22 bp, Homo sapiens
  source 1..22: mol_type = other DNA
gcctcacctctgcatcttagga

SEQ ID NO: 3967 - DNA, 22 bp, Homo sapiens
  source 1..22: mol_type = other DNA
tattcaccgctgcatcccacgg

SEQ ID NO: 3968 - DNA, 22 bp, Homo sapiens
  source 1..22: mol_type = other DNA
tgctcctactgcctgctcatgg

SEQ ID NO: 3969 - DNA, 21 bp, Homo sapiens
  source 1..21: mol_type = other DNA
tactcacctgcttgctcacag

SEQ ID NO: 3970 - DNA, 22 bp, Homo sapiens
  source 1..22: mol_type = other DNA
tcctcaccatgcaggctcaagg

SEQ ID NO: 3971 - DNA, 22 bp, Homo sapiens
  source 1..22: mol_type = other DNA
tattcaccactgcatctcaggc

SEQ ID NO: 3972 - DNA, 23 bp, Homo sapiens
  source 1..23: mol_type = other DNA
tagtcacctctgcatcttcatag

SEQ ID NO: 3973 - DNA, 23 bp, Homo sapiens
  source 1..23: mol_type = other DNA
cacccacctctgcatcccaaagt

SEQ ID NO: 3974 - DNA, 22 bp, Homo sapiens
  source 1..22: mol_type = other DNA
tagtaactctccatgctcatga

SEQ ID NO: 3975 - DNA, 22 bp, Homo sapiens
  source 1..22: mol_type = other DNA
tactcaatctccatgttcatag

SEQ ID NO: 3976 - DNA, 23 bp, Homo sapiens
  source 1..23: mol_type = other DNA
tatatacacctgcatactcatgg

SEQ ID NO: 3977 - DNA, 23 bp, Homo sapiens
  source 1..23: mol_type = other DNA
cagcaacccctgcatgcgcatgg

SEQ ID NO: 3978 - DNA, 23 bp, Homo sapiens
  source 1..23: mol_type = other DNA
ggttgacctctacatgttcatgg

SEQ ID NO: 3979 - DNA, 22 bp, Homo sapiens
  source 1..22: mol_type = other DNA
ttccaccttagcatgctctagg

SEQ ID NO: 3980 - DNA, 23 bp, Homo sapiens
  source 1..23: mol_type = other DNA
acagcacctgtacatgctcaagg

SEQ ID NO: 3981 - DNA, 23 bp, Homo sapiens
  source 1..23: mol_type = other DNA
tcaccacctccacatgctcatgc

SEQ ID NO: 3982 - DNA, 23 bp, Homo sapiens
  source 1..23: mol_type = other DNA
gactcagtcctgcatgctctggg

SEQ ID NO: 3983 - DNA, 23 bp, Homo sapiens
  source 1..23: mol_type = other DNA
tgctcatctctgcatctccaggg

SEQ ID NO: 3984 - DNA, 23 bp, Homo sapiens
  source 1..23: mol_type = other DNA
cagtgacctctgcatgcccctgg

SEQ ID NO: 3985 - DNA, 22 bp, Homo sapiens
  source 1..22: mol_type = other DNA
atgtcacctctcaagctcaggg

SEQ ID NO: 3986 - DNA, 21 bp, Homo sapiens
  source 1..21: mol_type = other DNA
tgcgcacctgcatgctcaggc

SEQ ID NO: 3987 - DNA, 23 bp, Homo sapiens
  source 1..23: mol_type = other DNA
ttctatgttctgcatgctctagg

SEQ ID NO: 3988 - DNA, 22 bp, Homo sapiens
  source 1..22: mol_type = other DNA
tagactctctgcatgctcatgc

SEQ ID NO: 3989 - DNA, 23 bp, Homo sapiens
  source 1..23: mol_type = other DNA
tgttcacctctgtataatcaagg

SEQ ID NO: 3990 - DNA, 22 bp, Homo sapiens
  source 1..22: mol_type = other DNA
gaaacacgtctcatgctcatgg

SEQ ID NO: 3991 - DNA, 23 bp, Homo sapiens
  source 1..23: mol_type = other DNA
tgctcacctctgcaagttctatg

SEQ ID NO: 3992 - DNA, 22 bp, Homo sapiens
  source 1..22: mol_type = other DNA
tacgcatctctgcatgtcaaga

SEQ ID NO: 3993 - DNA, 22 bp, Homo sapiens
  source 1..22: mol_type = other DNA
gactcaccccgcttgctctcgg

SEQ ID NO: 3994 - DNA, 22 bp, Homo sapiens
  source 1..22: mol_type = other DNA
taccacatctacctgctccagg

SEQ ID NO: 3995 - DNA, 23 bp, Homo sapiens
  source 1..23: mol_type = other DNA
cattcacacgtgcatgctcacag

SEQ ID NO: 3996 - DNA, 23 bp, Homo sapiens
  source 1..23: mol_type = other DNA
ccctcacctccacatgtccaagg

SEQ ID NO: 3997 - DNA, 23 bp, Homo sapiens
  source 1..23: mol_type = other DNA
aagtgaactctgcatactctggg

SEQ ID NO: 3998 - DNA, 23 bp, Homo sapiens
  source 1..23: mol_type = other DNA
cactttcatctgcatactcatga

SEQ ID NO: 3999 - DNA, 24 bp, Homo sapiens
  source 1..24: mol_type = other DNA
tctccaccatctgcatgctccagg

SEQ ID NO: 4000 - DNA, 23 bp, Homo sapiens
  source 1..23: mol_type = other DNA
gagtcacctatgcatgctcttag

SEQ ID NO: 4001 - DNA, 22 bp, Homo sapiens
  source 1..22: mol_type = other DNA
aagtcacagtgcatgctcaagg

SEQ ID NO: 4002 - DNA, 22 bp, Homo sapiens
  source 1..22: mol_type = other DNA
tacccaccttgcatgctccaca

SEQ ID NO: 4003 - DNA, 23 bp, Homo sapiens
  source 1..23: mol_type = other DNA
actgcaccactgcatgctcatgt

SEQ ID NO: 4004 - DNA, 23 bp, Homo sapiens
  source 1..23: mol_type = other DNA
tatatacctgagcatgctccagg

SEQ ID NO: 4005 - DNA, 23 bp, Homo sapiens
  source 1..23: mol_type = other DNA
tactcaccactgtctgctctgtg

SEQ ID NO: 4006 - DNA, 22 bp, Homo sapiens
  source 1..22: mol_type = other DNA
gaaacaccttccatgctcatgg

SEQ ID NO: 4007 - DNA, 22 bp, Homo sapiens
  source 1..22: mol_type = other DNA
ccctcacctctcatgttcctgg

SEQ ID NO: 4008 - DNA, 23 bp, Homo sapiens
  source 1..23: mol_type = other DNA
acctctccactgcatgctaagga

SEQ ID NO: 4009 - DNA, 23 bp, Homo sapiens
  source 1..23: mol_type = other DNA
cactcaccactacatgttcacaa

SEQ ID NO: 4010 - DNA, 23 bp, Homo sapiens
  source 1..23: mol_type = other DNA
aactcaccactgcatgttctaac

SEQ ID NO: 4011 - DNA, 22 bp, Homo sapiens
  source 1..22: mol_type = other DNA
aactctccctgcctgcacaagg

SEQ ID NO: 4012 - DNA, 23 bp, Homo sapiens
  source 1..23: mol_type = other DNA
tactgagctccacatgctcacta

SEQ ID NO: 4013 - DNA, 24 bp, Homo sapiens
  source 1..24: mol_type = other DNA
ccctaacccctgcattgctcatgg

SEQ ID NO: 4014 - DNA, 22 bp, Homo sapiens
  source 1..22: mol_type = other DNA
tgcctcctatgaatgctcatgg

SEQ ID NO: 4015 - DNA, 22 bp, Homo sapiens
  source 1..22: mol_type = other DNA
tcttcacctctgatgctcactg

SEQ ID NO: 4016 - DNA, 22 bp, Homo sapiens
  source 1..22: mol_type = other DNA
tatgatctctgcatgttcatga

SEQ ID NO: 4017 - DNA, 23 bp, Homo sapiens
  source 1..23: mol_type = other DNA
tagcccccactgcatggtcatgc

SEQ ID NO: 4018 - DNA, 23 bp, Homo sapiens
  source 1..23: mol_type = other DNA
aactgacctctgcaggttcattc

SEQ ID NO: 4019 - DNA, 23 bp, Homo sapiens
  source 1..23: mol_type = other DNA
tagtcacttccacatactcactg

SEQ ID NO: 4020 - DNA, 22 bp, Homo sapiens
  source 1..22: mol_type = other DNA
gtctcacctcgactgctcatgg

SEQ ID NO: 4021 - DNA, 24 bp, Homo sapiens
  source 1..24: mol_type = other DNA
tcctcacccctgcaaagctcaggg

SEQ ID NO: 4022 - DNA, 21 bp, Homo sapiens
  source 1..21: mol_type = other DNA
tactctcctccatgctcttgg

SEQ ID NO: 4023 - DNA, 22 bp, Homo sapiens
  source 1..22: mol_type = other DNA
cacttaccccagcatgtcatgg

SEQ ID NO: 4024 - DNA, 23 bp, Homo sapiens
  source 1..23: mol_type = other DNA
tgctgtactctgcatgatcagtg

SEQ ID NO: 4025 - DNA, 23 bp, Homo sapiens
  source 1..23: mol_type = other DNA
aaatcagcaatgcatgctcactg

SEQ ID NO: 4026 - DNA, 23 bp, Homo sapiens
  source 1..23: mol_type = other DNA
aatccacatatgcatactcaggg

SEQ ID NO: 4027 - DNA, 23 bp, Homo sapiens
  source 1..23: mol_type = other DNA
tactcacccttgcaagcataagg

SEQ ID NO: 4028 - DNA, 22 bp, Homo sapiens
  source 1..22: mol_type = other DNA
tacccaccatgcatgcacagag

SEQ ID NO: 4029 - DNA, 22 bp, Homo sapiens
  source 1..22: mol_type = other DNA
tcatcacctctgatgcccctgg

SEQ ID NO: 4030 - DNA, 23 bp, Homo sapiens
  source 1..23: mol_type = other DNA
tgttcacatctttatgctcatgc

SEQ ID NO: 4031 - DNA, 23 bp, Homo sapiens
  source 1..23: mol_type = other DNA
tactcccctgcacctgctccagg

SEQ ID NO: 4032 - DNA, 25 bp, Homo sapiens
  source 1..25: mol_type = other DNA
tattcacctctgctaatggtaaaag

SEQ ID NO: 4033 - DNA, 22 bp, Homo sapiens
  source 1..22: mol_type = other DNA
ttcacacctgtgctgctctggg

SEQ ID NO: 4034 - DNA, 22 bp, Homo sapiens
  source 1..22: mol_type = other DNA
tactcatgcctgcagctcaagg

SEQ ID NO: 4035 - DNA, 23 bp, Homo sapiens
  source 1..23: mol_type = other DNA
tatgcacaccagcatgcacacgg

SEQ ID NO: 4036 - DNA, 23 bp, Homo sapiens
  source 1..23: mol_type = other DNA
cactcatccatgcatgctcaccc

SEQ ID NO: 4037 - DNA, 23 bp, Homo sapiens
  source 1..23: mol_type = other DNA
gactcagctctggatgcccggtg

SEQ ID NO: 4038 - DNA, 21 bp, Homo sapiens
  source 1..21: mol_type = other DNA
ttttcacctccatgcacaggg

SEQ ID NO: 4039 - DNA, 22 bp, Homo sapiens
  source 1..22: mol_type = other DNA
cactccctctggaagctctagg

SEQ ID NO: 4040 - DNA, 23 bp, Homo sapiens
  source 1..23: mol_type = other DNA
ccctcacctctgccttctcctga

SEQ ID NO: 4041 - DNA, 23 bp, Homo sapiens
  source 1..23: mol_type = other DNA
tactcacctgaacctgcccagtg

SEQ ID NO: 4042 - DNA, 24 bp, Homo sapiens
  source 1..24: mol_type = other DNA
atctcacctctgacatgctaaggc

SEQ ID NO: 4043 - DNA, 21 bp, Homo sapiens
  source 1..21: mol_type = other DNA
tactcacgtgcatgcccagag

SEQ ID NO: 4044 - DNA, 22 bp, Homo sapiens
  source 1..22: mol_type = other DNA
ttctcactctgcatgcttacat

SEQ ID NO: 4045 - DNA, 22 bp, Homo sapiens
  source 1..22: mol_type = other DNA
ttgtcacccctgcttgtcacgg

SEQ ID NO: 4046 - DNA, 23 bp, Homo sapiens
  source 1..23: mol_type = other DNA
tacccacctcagcatggcagggg

SEQ ID NO: 4047 - DNA, 23 bp, Homo sapiens
  source 1..23: mol_type = other DNA
tacccacctcagcctcctaaagt

SEQ ID NO: 4048 - DNA, 23 bp, Homo sapiens
  source 1..23: mol_type = other DNA
tactaacgtgtgcatgtccgggg

SEQ ID NO: 4049 - DNA, 23 bp, Homo sapiens
  source 1..23: mol_type = other DNA
tactcacctcttctcgctggttg

SEQ ID NO: 4050 - DNA, 23 bp, Homo sapiens
  source 1..23: mol_type = other DNA
tactcaaatctgcaagatcataa

SEQ ID NO: 4051 - DNA, 23 bp, Homo sapiens
  source 1..23: mol_type = other DNA
aacacacatgtgcatgcacatgc

SEQ ID NO: 4052 - DNA, 23 bp, Homo sapiens
  source 1..23: mol_type = other DNA
tacataccacagcatgctcagct

SEQ ID NO: 4053 - DNA, 23 bp, Homo sapiens
  source 1..23: mol_type = other DNA
tttacacccctccatactcatgg

SEQ ID NO: 4054 - DNA, 23 bp, Homo sapiens
  source 1..23: mol_type = other DNA
taaacacctctgtatgctatggt

SEQ ID NO: 4055 - DNA, 23 bp, Homo sapiens
  source 1..23: mol_type = other DNA
tactaacaacttcttgctcatgc

SEQ ID NO: 4056 - DNA, 25 bp, Homo sapiens
  source 1..25: mol_type = other DNA
tactcccctctggccttacccatgg

SEQ ID NO: 4057 - DNA, 22 bp, Homo sapiens
  source 1..22: mol_type = other DNA
aactcactctggattctctggg

SEQ ID NO: 4058 - DNA, 22 bp, Homo sapiens
  source 1..22: mol_type = other DNA
cactcaccctgcatcatcgggg

SEQ ID NO: 4059 - DNA, 22 bp, Homo sapiens
  source 1..22: mol_type = other DNA
tacccaccccgcttcctcaagg

SEQ ID NO: 4060 - DNA, 21 bp, Homo sapiens
  source 1..21: mol_type = other DNA
tactcctctgcatggccaaag

SEQ ID NO: 4061 - DNA, 22 bp, Homo sapiens
  source 1..22: mol_type = other DNA
tactaaccttaaatgctaatgg

SEQ ID NO: 4062 - DNA, 22 bp, Homo sapiens
  source 1..22: mol_type = other DNA
tttttacctgtgcatctcaggg

SEQ ID NO: 4063 - DNA, 22 bp, Homo sapiens
  source 1..22: mol_type = other DNA
ctcttacctctgcatgccacag

SEQ ID NO: 4064 - DNA, 21 bp, Homo sapiens
  source 1..21: mol_type = other DNA
ttctcacctctgcattcagtg

SEQ ID NO: 4065 - DNA, 23 bp, Homo sapiens
  source 1..23: mol_type = other DNA
taaactccgctgcctgcccatgg

SEQ ID NO: 4066 - DNA, 23 bp, Homo sapiens
  source 1..23: mol_type = other DNA
ttcttacctctgcatggttgagg

SEQ ID NO: 4067 - DNA, 23 bp, Homo sapiens
  source 1..23: mol_type = other DNA
tactgacctctctacgcacattg

SEQ ID NO: 4068 - DNA, 23 bp, Homo sapiens
  source 1..23: mol_type = other DNA
tattcaccttgggatgcccagtg

SEQ ID NO: 4069 - DNA, 22 bp, Homo sapiens
  source 1..22: mol_type = other DNA
tactcactgtccatactcactg

SEQ ID NO: 4070 - DNA, 23 bp, Homo sapiens
  source 1..23: mol_type = other DNA
tactcatctctgagtgcccttgg

SEQ ID NO: 4071 - DNA, 24 bp, Homo sapiens
  source 1..24: mol_type = other DNA
tacagcacctctgcattgccaggg

SEQ ID NO: 4072 - DNA, 23 bp, Homo sapiens
  source 1..23: mol_type = other DNA
tattcacctctgcatctccaggg

SEQ ID NO: 4073 - DNA, 23 bp, Homo sapiens
  source 1..23: mol_type = other DNA
tactcatccatacatgctcatgg

SEQ ID NO: 4074 - DNA, 23 bp, Homo sapiens
  source 1..23: mol_type = other DNA
tattcacctctgcttgctgaggg

SEQ ID NO: 4075 - DNA, 22 bp, Homo sapiens
  source 1..22: mol_type = other DNA
tatttacctctgcatctcagag

SEQ ID NO: 4076 - DNA, 23 bp, Homo sapiens
  source 1..23: mol_type = other DNA
cattcacctctgcatggataggg

SEQ ID NO: 4077 - DNA, 23 bp, Homo sapiens
  source 1..23: mol_type = other DNA
tattcactactgcatgcccaggg

SEQ ID NO: 4078 - DNA, 23 bp, Homo sapiens
  source 1..23: mol_type = other DNA
atccaacctatgcatgctcaggg

SEQ ID NO: 4079 - DNA, 22 bp, Homo sapiens
  source 1..22: mol_type = other DNA
caatacctctgtatgttcaggg

SEQ ID NO: 4080 - DNA, 22 bp, Homo sapiens
  source 1..22: mol_type = other DNA
aaatcaccctgcatgctcatgg

SEQ ID NO: 4081 - DNA, 21 bp, Homo sapiens
  source 1..21: mol_type = other DNA
taatcctatgcatgctcacag

SEQ ID NO: 4082 - DNA, 23 bp, Homo sapiens
  source 1..23: mol_type = other DNA
tgctctcctatgcatgctctggg

SEQ ID NO: 4083 - DNA, 23 bp, Homo sapiens
  source 1..23: mol_type = other DNA
tactcacctctgcattcacagaa

SEQ ID NO: 4084 - DNA, 23 bp, Homo sapiens
  source 1..23: mol_type = other DNA
ctcccacctctgcatgctcctcg

SEQ ID NO: 4085 - DNA, 23 bp, Homo sapiens
  source 1..23: mol_type = other DNA
gactcatacatgcatgctcatga

SEQ ID NO: 4086 - DNA, 23 bp, Homo sapiens
  source 1..23: mol_type = other DNA
tccagtactctacatgctcaggg

SEQ ID NO: 4087 - DNA, 23 bp, Homo sapiens
  source 1..23: mol_type = other DNA
ttgttaactctgtatgctcttgg

SEQ ID NO: 4088 - DNA, 23 bp, Homo sapiens
  source 1..23: mol_type = other DNA
tccacattattgcatgctcatgg

SEQ ID NO: 4089 - DNA, 23 bp, Homo sapiens
  source 1..23: mol_type = other DNA
ttctctactctacatgttcaggg

SEQ ID NO: 4090 - DNA, 22 bp, Homo sapiens
  source 1..22: mol_type = other DNA
tatactactctgctgctcaggg

SEQ ID NO: 4091 - DNA, 22 bp, Homo sapiens
  source 1..22: mol_type = other DNA
taaccacactgcatgctctggg

SEQ ID NO: 4092 - DNA, 22 bp, Homo sapiens
  source 1..22: mol_type = other DNA
tggtacctctgcatgtccatgg

SEQ ID NO: 4093 - DNA, 22 bp, Homo sapiens
  source 1..22: mol_type = other DNA
ttctacctcagcatgttcaagg

SEQ ID NO: 4094 - DNA, 22 bp, Homo sapiens
  source 1..22: mol_type = other DNA
ctctcaccctgcatggtcagag

SEQ ID NO: 4095 - DNA, 23 bp, Homo sapiens
  source 1..23: mol_type = other DNA
tacaatcctcagcatgttcatgg

SEQ ID NO: 4096 - DNA, 22 bp, Homo sapiens
  source 1..22: mol_type = other DNA
tcatcacctatgcatgtcaagg

SEQ ID NO: 4097 - DNA, 23 bp, Homo sapiens
  source 1..23: mol_type = other DNA
cccacacctctacaagctcaggg

SEQ ID NO: 4098 - DNA, 22 bp, Homo sapiens
  source 1..22: mol_type = other DNA
aacacacatcccatgctcatgg

SEQ ID NO: 4099 - DNA, 22 bp, Homo sapiens
  source 1..22: mol_type = other DNA
aactaatatctgatgctcaagg

SEQ ID NO: 4100 - DNA, 22 bp, Homo sapiens
  source 1..22: mol_type = other DNA
tactcatcctgcatactccctg

SEQ ID NO: 4101 - DNA, 24 bp, Homo sapiens
  source 1..24: mol_type = other DNA
aactcaccactggcatgcccgggg

SEQ ID NO: 4102 - DNA, 23 bp, Homo sapiens
  source 1..23: mol_type = other DNA
cacagcctactgcatgctcaagg

SEQ ID NO: 4103 - DNA, 23 bp, Homo sapiens
  source 1..23: mol_type = other DNA
acagcaactctgtatgctcaagg

SEQ ID NO: 4104 - DNA, 22 bp, Homo sapiens
  source 1..22: mol_type = other DNA
tactgcctcagcatgctccatg

SEQ ID NO: 4105 - DNA, 23 bp, Homo sapiens
  source 1..23: mol_type = other DNA
cagcccccactgcatgcacatgg

SEQ ID NO: 4106 - DNA, 23 bp, Homo sapiens
  source 1..23: mol_type = other DNA
cacataactctacatgcttaagg

SEQ ID NO: 4107 - DNA, 22 bp, Homo sapiens
  source 1..22: mol_type = other DNA
gtcccacctctgcatctcatgc

SEQ ID NO: 4108 - DNA, 21 bp, Homo sapiens
  source 1..21: mol_type = other DNA
tgctcacctctgtgctcatgg

SEQ ID NO: 4109 - DNA, 23 bp, Homo sapiens
  source 1..23: mol_type = other DNA
tactcacccctgcctcctcaagg

SEQ ID NO: 4110 - DNA, 22 bp, Homo sapiens
  source 1..22: mol_type = other DNA
cactcattctgcatgatccagg

SEQ ID NO: 4111 - DNA, 23 bp, Homo sapiens
  source 1..23: mol_type = other DNA
cactcacctctgcattctgggaa

SEQ ID NO: 4112 - DNA, 23 bp, Homo sapiens
  source 1..23: mol_type = other DNA
gtctcacctctgcctgctcagga

SEQ ID NO: 4113 - DNA, 22 bp, Homo sapiens
  source 1..22: mol_type = other DNA
ttctcaaactgcatgctcatgc

SEQ ID NO: 4114 - DNA, 23 bp, Homo sapiens
  source 1..23: mol_type = other DNA
cccacacccctacaagctcaggg

SEQ ID NO: 4115 - DNA, 22 bp, Homo sapiens
  source 1..22: mol_type = other DNA
taaaaccactgcatgttcaggg

SEQ ID NO: 4116 - DNA, 22 bp, Homo sapiens
  source 1..22: mol_type = other DNA
ctctcacctctgctactcagtg

SEQ ID NO: 4117 - DNA, 23 bp, Homo sapiens
  source 1..23: mol_type = other DNA
cacacacacacgcatgctcatgg

SEQ ID NO: 4118 - DNA, 24 bp, Homo sapiens
  source 1..24: mol_type = other DNA
tcctgtaactctgcatgcacaagg

SEQ ID NO: 4119 - DNA, 22 bp, Homo sapiens
  source 1..22: mol_type = other DNA
tactccctctgtaggctctagg

SEQ ID NO: 4120 - DNA, 22 bp, Homo sapiens
  source 1..22: mol_type = other DNA
tcctacctttacatactcaagg

SEQ ID NO: 4121 - DNA, 22 bp, Homo sapiens
  source 1..22: mol_type = other DNA
gtctcacccctgctgcccacgg

SEQ ID NO: 4122 - DNA, 22 bp, Homo sapiens
  source 1..22: mol_type = other DNA
tagtcatatctacatctcaggg

SEQ ID NO: 4123 - DNA, 23 bp, Homo sapiens
  source 1..23: mol_type = other DNA
ggatcacctctgcatcttcaagg

SEQ ID NO: 4124 - DNA, 22 bp, Homo sapiens
  source 1..22: mol_type = other DNA
tcctcaccttgcatactctttg

SEQ ID NO: 4125 - DNA, 23 bp, Homo sapiens
  source 1..23: mol_type = other DNA
tcagcacctctgcttggtcaagg

SEQ ID NO: 4126 - DNA, 24 bp, Homo sapiens
  source 1..24: mol_type = other DNA
tattgcacctctgcatgcctcagg

SEQ ID NO: 4127 - DNA, 21 bp, Homo sapiens
  source 1..21: mol_type = other DNA
tacatacctccatgctcatag

SEQ ID NO: 4128 - DNA, 23 bp, Homo sapiens
  source 1..23: mol_type = other DNA
tgctctgcactgcatgctctggg

SEQ ID NO: 4129 - DNA, 23 bp, Homo sapiens
  source 1..23: mol_type = other DNA
aaatcatctccacatgctcatag

SEQ ID NO: 4130 - DNA, 23 bp, Homo sapiens
  source 1..23: mol_type = other DNA
atttcacttctgcatgctctatg

SEQ ID NO: 4131 - DNA, 23 bp, Homo sapiens
  source 1..23: mol_type = other DNA
aacaaaacactgcatgctcatga

SEQ ID NO: 4132 - DNA, 23 bp, Homo sapiens
  source 1..23: mol_type = other DNA
catacaccacagcatgctcaccg

SEQ ID NO: 4133 - DNA, 23 bp, Homo sapiens
  source 1..23: mol_type = other DNA
aacttccacctccatgctcaagg

SEQ ID NO: 4134 - DNA, 24 bp, Homo sapiens
  source 1..24: mol_type = other DNA
aacacaacatctgcatactcaggg

SEQ ID NO: 4135 - DNA, 23 bp, Homo sapiens
  source 1..23: mol_type = other DNA
agtgcccctctgcctgctcaggg

SEQ ID NO: 4136 - DNA, 23 bp, Homo sapiens
  source 1..23: mol_type = other DNA
gtctaacctctgcatgctccaca

SEQ ID NO: 4137 - DNA, 23 bp, Homo sapiens
  source 1..23: mol_type = other DNA
gcctcacttctggatgctcatgg

SEQ ID NO: 4138 - DNA, 23 bp, Homo sapiens
  source 1..23: mol_type = other DNA
ccctcacccctgcatgtataagg

SEQ ID NO: 4139 - DNA, 23 bp, Homo sapiens
  source 1..23: mol_type = other DNA
aagagacctctgcatgcacagtg

SEQ ID NO: 4140 - DNA, 23 bp, Homo sapiens
  source 1..23: mol_type = other DNA
tacctccctaagcatgcacatgg

SEQ ID NO: 4141 - DNA, 23 bp, Homo sapiens
  source 1..23: mol_type = other DNA
tctacacttcagcatgctccagg

SEQ ID NO: 4142 - DNA, 23 bp, Homo sapiens
  source 1..23: mol_type = other DNA
aactccctgctgtatgctcatga

SEQ ID NO: 4143 - DNA, 22 bp, Homo sapiens
  source 1..22: mol_type = other DNA
gactacctctacatgttcagtg

SEQ ID NO: 4144 - DNA, 22 bp, Homo sapiens
  source 1..22: mol_type = other DNA
tcttcacatcccatgctcatgg

SEQ ID NO: 4145 - DNA, 23 bp, Homo sapiens
  source 1..23: mol_type = other DNA
gccaaacatctgcatgctcatgc

SEQ ID NO: 4146 - DNA, 23 bp, Homo sapiens
  source 1..23: mol_type = other DNA
cacacacggatgcatgcacatgg

SEQ ID NO: 4147 - DNA, 23 bp, Homo sapiens
  source 1..23: mol_type = other DNA
cacccacctctgcatgcccagtc

SEQ ID NO: 4148 - DNA, 23 bp, Homo sapiens
  source 1..23: mol_type = other DNA
taaagatcagtgcatgctcacgg

SEQ ID NO: 4149 - DNA, 23 bp, Homo sapiens
  source 1..23: mol_type = other DNA
tacttacctctccatgctctagc

SEQ ID NO: 4150 - DNA, 24 bp, Homo sapiens
  source 1..24: mol_type = other DNA
tagtcaaccactgcatagtcacgg

SEQ ID NO: 4151 - DNA, 23 bp, Homo sapiens
  source 1..23: mol_type = other DNA
aacataccactgcatgctcacac

SEQ ID NO: 4152 - DNA, 22 bp, Homo sapiens
  source 1..22: mol_type = other DNA
tgctcactctgaatactcaagg

SEQ ID NO: 4153 - DNA, 22 bp, Homo sapiens
  source 1..22: mol_type = other DNA
aaaacacatctcatgctcatgg

SEQ ID NO: 4154 - DNA, 23 bp, Homo sapiens
  source 1..23: mol_type = other DNA
ttctccccactgtatgcagaagg

SEQ ID NO: 4155 - DNA, 23 bp, Homo sapiens
  source 1..23: mol_type = other DNA
tactcactactgaaagctcaggg

SEQ ID NO: 4156 - DNA, 22 bp, Homo sapiens
  source 1..22: mol_type = other DNA
aacacgcctcgcatgctcatgt

SEQ ID NO: 4157 - DNA, 21 bp, Homo sapiens
  source 1..21: mol_type = other DNA
cattcacctccaagctcacgg

SEQ ID NO: 4158 - DNA, 21 bp, Homo sapiens
  source 1..21: mol_type = other DNA
cactcaccaccatgctcaggt

SEQ ID NO: 4159 - DNA, 23 bp, Homo sapiens
  source 1..23: mol_type = other DNA
ctctcaccactgcatgcacttgc

SEQ ID NO: 4160 - DNA, 22 bp, Homo sapiens
  source 1..22: mol_type = other DNA
gactctcctctcaggctcatgg

SEQ ID NO: 4161 - DNA, 22 bp, Homo sapiens
  source 1..22: mol_type = other DNA
caagcacctctgcctctcaggg

SEQ ID NO: 4162 - DNA, 22 bp, Homo sapiens
  source 1..22: mol_type = other DNA
tactcacctgtgcagatatggg

SEQ ID NO: 4163 - DNA, 23 bp, Homo sapiens
  source 1..23: mol_type = other DNA
tcatcacctctccatgctagggc

SEQ ID NO: 4164 - DNA, 24 bp, Homo sapiens
  source 1..24: mol_type = other DNA
tgctgacactctacatgctgacgg

SEQ ID NO: 4165 - DNA, 22 bp, Homo sapiens
  source 1..22: mol_type = other DNA
ttctaattctgcaagctcaggg

SEQ ID NO: 4166 - DNA, 23 bp, Homo sapiens
  source 1..23: mol_type = other DNA
atctcaccactgcatactccagc

SEQ ID NO: 4167 - DNA, 23 bp, Homo sapiens
  source 1..23: mol_type = other DNA
cacctacatctacaggctcaagg

SEQ ID NO: 4168 - DNA, 23 bp, Homo sapiens
  source 1..23: mol_type = other DNA
cattaccctctgcttgcccaggg

SEQ ID NO: 4169 - DNA, 23 bp, Homo sapiens
  source 1..23: mol_type = other DNA
tacatgcatgtgcatgctcagtg

SEQ ID NO: 4170 - DNA, 22 bp, Homo sapiens
  source 1..22: mol_type = other DNA
tactcccctttgcatctcaaga

SEQ ID NO: 4171 - DNA, 23 bp, Homo sapiens
  source 1..23: mol_type = other DNA
tactcccctctgcctgccctctg

SEQ ID NO: 4172 - DNA, 23 bp, Homo sapiens
  source 1..23: mol_type = other DNA
tacacacctttatatgctcatgg

SEQ ID NO: 4173 - DNA, 21 bp, Homo sapiens
  source 1..21: mol_type = other DNA
tcctcacccccatgcacaagg

SEQ ID NO: 4174 - DNA, 22 bp, Homo sapiens
  source 1..22: mol_type = other DNA
ttcccaccagtgatgctcaagg

SEQ ID NO: 4175 - DNA, 23 bp, Homo sapiens
  source 1..23: mol_type = other DNA
gacccacctctgcaaggtgaaga

SEQ ID NO: 4176 - DNA, 23 bp, Homo sapiens
  source 1..23: mol_type = other DNA
ttctcacgaaagcattctcatgg

SEQ ID NO: 4177 - DNA, 23 bp, Homo sapiens
  source 1..23: mol_type = other DNA
gattcacctttgcatgttctttg

SEQ ID NO: 4178 - DNA, 23 bp, Homo sapiens
  source 1..23: mol_type = other DNA
tactcccccctgcagggtgaagg

SEQ ID NO: 4179 - DNA, 24 bp, Homo sapiens
  source 1..24: mol_type = other DNA
tactcacttgctgcctggtctagg

SEQ ID NO: 4180 - DNA, 22 bp, Homo sapiens
  source 1..22: mol_type = other DNA
tagactcctctgctgctcacag

SEQ ID NO: 4181 - DNA, 22 bp, Homo sapiens
  source 1..22: mol_type = other DNA
tactccctctgcactctcctgg

SEQ ID NO: 4182 - DNA, 22 bp, Homo sapiens
  source 1..22: mol_type = other DNA
cactcactctgcatcctctgag

SEQ ID NO: 4183 - DNA, 22 bp, Homo sapiens
  source 1..22: mol_type = other DNA
atctcacccctgcattccaggg

SEQ ID NO: 4184 - DNA, 23 bp, Homo sapiens
  source 1..23: mol_type = other DNA
ttcccacatctgcatactcactt

SEQ ID NO: 4185 - DNA, 23 bp, Homo sapiens
  source 1..23: mol_type = other DNA
ctctgacctatgcatgcttcagg

SEQ ID NO: 4186 - DNA, 23 bp, Homo sapiens
  source 1..23: mol_type = other DNA
tacaaaactgttcatgctcagtg

SEQ ID NO: 4187 - DNA, 23 bp, Homo sapiens
  source 1..23: mol_type = other DNA
tacctacctctggatgcccacag

SEQ ID NO: 4188 - DNA, 23 bp, Homo sapiens
  source 1..23: mol_type = other DNA
tactcccatcagcaagatcatgt

SEQ ID NO: 4189 - DNA, 22 bp, Homo sapiens
  source 1..22: mol_type = other DNA
tagtcaacttgcaggctaatgg

SEQ ID NO: 4190 - DNA, 21 bp, Homo sapiens
  source 1..21: mol_type = other DNA
tactcaactatatgctcaagt

SEQ ID NO: 4191 - DNA, 23 bp, Homo sapiens
  source 1..23: mol_type = other DNA
ctcacaactctgcattctcttgg

SEQ ID NO: 4192 - DNA, 22 bp, Homo sapiens
  source 1..22: mol_type = other DNA
tactccctctgctttctcctga

SEQ ID NO: 4193 - DNA, 22 bp, Homo sapiens
  source 1..22: mol_type = other DNA
ccctcaccctgcatgctgatga

SEQ ID NO: 4194 - DNA, 21 bp, Homo sapiens
  source 1..21: mol_type = other DNA
tactcacctctgctcttactg

SEQ ID NO: 4195 - DNA, 23 bp, Homo sapiens
  source 1..23: mol_type = other DNA
tactcaccactgactcctcacca

SEQ ID NO: 4196 - DNA, 23 bp, Homo sapiens
  source 1..23: mol_type = other DNA
tactcaagcctacatgctcataa

SEQ ID NO: 4197 - DNA, 23 bp, Homo sapiens
  source 1..23: mol_type = other DNA
tactcatttctgcatgcttcatg

SEQ ID NO: 4198 - DNA, 22 bp, Homo sapiens
  source 1..22: mol_type = other DNA
tactctttctgtattctcaggg

SEQ ID NO: 4199 - DNA, 22 bp, Homo sapiens
  source 1..22: mol_type = other DNA
tattcacctcttcatctcagac

SEQ ID NO: 4200 - DNA, 22 bp, Homo sapiens
  source 1..22: mol_type = other DNA
tactcacattccatgctcatgg

SEQ ID NO: 4201 - DNA, 22 bp, Homo sapiens
  source 1..22: mol_type = other DNA
agctcacctcgcatgttcaagg

SEQ ID NO: 4202 - DNA, 23 bp, Homo sapiens
  source 1..23: mol_type = other DNA
tactcacctctgtatctccaagg

SEQ ID NO: 4203 - DNA, 23 bp, Homo sapiens
  source 1..23: mol_type = other DNA
tacgcaccactgcatgcccagtg

SEQ ID NO: 4204 - DNA, 22 bp, Homo sapiens
  source 1..22: mol_type = other DNA
tactcactctgcctgttcatgg

SEQ ID NO: 4205 - DNA, 23 bp, Homo sapiens
  source 1..23: mol_type = other DNA
tacacacctctgcaagctctctg

SEQ ID NO: 4206 - DNA, 23 bp, Homo sapiens
  source 1..23: mol_type = other DNA
ttatcaccactacatgctcttag

SEQ ID NO: 4207 - DNA, 23 bp, Homo sapiens
  source 1..23: mol_type = other DNA
aactcaccgctgcatgccccagg

SEQ ID NO: 4208 - DNA, 22 bp, Homo sapiens
  source 1..22: mol_type = other DNA
ctctcacctctgcagctcaggg

SEQ ID NO: 4209 - DNA, 23 bp, Homo sapiens
  source 1..23: mol_type = other DNA
tacccacctctgcttacccatgg

SEQ ID NO: 4210 - DNA, 22 bp, Homo sapiens
  source 1..22: mol_type = other DNA
aactcactcagcatgttctagg

SEQ ID NO: 4211 - DNA, 21 bp, Homo sapiens
  source 1..21: mol_type = other DNA
tactcacatacatgttcatgg

SEQ ID NO: 4212 - DNA, 23 bp, Homo sapiens
  source 1..23: mol_type = other DNA
ctctctctactgcatgctcctgg

SEQ ID NO: 4213 - DNA, 22 bp, Homo sapiens
  source 1..22: mol_type = other DNA
cacacacctctgcagctcaggg

SEQ ID NO: 4214 - DNA, 23 bp, Homo sapiens
  source 1..23: mol_type = other DNA
aatacacctctgcatgtcctggg

SEQ ID NO: 4215 - DNA, 23 bp, Homo sapiens
  source 1..23: mol_type = other DNA
cactcacctctgcatctctagtg

SEQ ID NO: 4216 - DNA, 22 bp, Homo sapiens
  source 1..22: mol_type = other DNA
taataaatctgcatgctcttgg

SEQ ID NO: 4217 - DNA, 23 bp, Homo sapiens
  source 1..23: mol_type = other DNA
cattatcaactgcatgctcacgg

SEQ ID NO: 4218 - DNA, 23 bp, Homo sapiens
  source 1..23: mol_type = other DNA
tcttcaccaccacatgctcaggg

SEQ ID NO: 4219 - DNA, 21 bp, Homo sapiens
  source 1..21: mol_type = other DNA
tactcatctgcaagctcagga

SEQ ID NO: 4220 - DNA, 23 bp, Homo sapiens
  source 1..23: mol_type = other DNA
atatcacctttacatgctcctgg

SEQ ID NO: 4221 - DNA, 23 bp, Homo sapiens
  source 1..23: mol_type = other DNA
attttacctctgcaggctcagag

SEQ ID NO: 4222 - DNA, 23 bp, Homo sapiens
  source 1..23: mol_type = other DNA
tacccaaccttgcatactcaagg

SEQ ID NO: 4223 - DNA, 24 bp, Homo sapiens
  source 1..24: mol_type = other DNA
cacacacccctagcatgcacaagg

SEQ ID NO: 4224 - DNA, 22 bp, Homo sapiens
  source 1..22: mol_type = other DNA
tacccaccctacatgccctcgg

SEQ ID NO: 4225 - DNA, 23 bp, Homo sapiens
  source 1..23: mol_type = other DNA
tgctcatctctgcatattcatgg

SEQ ID NO: 4226 - DNA, 23 bp, Homo sapiens
  source 1..23: mol_type = other DNA
taattacctctgcatgctttcag

SEQ ID NO: 4227 - DNA, 23 bp, Homo sapiens
  source 1..23: mol_type = other DNA
gactccacattgcatgctcaggg

SEQ ID NO: 4228 - DNA, 23 bp, Homo sapiens
  source 1..23: mol_type = other DNA
tattcacctctgcattcacagtg

SEQ ID NO: 4229 - DNA, 22 bp, Homo sapiens
  source 1..22: mol_type = other DNA
taatcccactgcatgctcaaga

SEQ ID NO: 4230 - DNA, 23 bp, Homo sapiens
  source 1..23: mol_type = other DNA
tcctctactatacatgctcaagg

SEQ ID NO: 4231 - DNA, 22 bp, Homo sapiens
  source 1..22: mol_type = other DNA
gattcacctctgatgctcagag

SEQ ID NO: 4232 - DNA, 22 bp, Homo sapiens
  source 1..22: mol_type = other DNA
tactcattgtacatgcttaagg

SEQ ID NO: 4233 - DNA, 22 bp, Homo sapiens
  source 1..22: mol_type = other DNA
tagtaacctctgcatttcacgg

SEQ ID NO: 4234 - DNA, 22 bp, Homo sapiens
  source 1..22: mol_type = other DNA
aactcactctgcatgcaactgg

SEQ ID NO: 4235 - DNA, 23 bp, Homo sapiens
  source 1..23: mol_type = other DNA
attttaccactgcaagctcatgg

SEQ ID NO: 4236 - DNA, 23 bp, Homo sapiens
  source 1..23: mol_type = other DNA
gacaaggctatgcatgctcaagg

SEQ ID NO: 4237 - DNA, 22 bp, Homo sapiens
  source 1..22: mol_type = other DNA
cagttacccttcatgctcatgg

SEQ ID NO: 4238 - DNA, 23 bp, Homo sapiens
  source 1..23: mol_type = other DNA
tcctcacctcttcatgtccagga

SEQ ID NO: 4239 - DNA, 22 bp, Homo sapiens
  source 1..22: mol_type = other DNA
ttttaacctctgcatcccaagg

SEQ ID NO: 4240 - DNA, 22 bp, Homo sapiens
  source 1..22: mol_type = other DNA
tatcacctctgcatgtcaaaag

SEQ ID NO: 4241 - DNA, 22 bp, Homo sapiens
  source 1..22: mol_type = other DNA
tactcactctccatgctcacat

SEQ ID NO: 4242 - DNA, 22 bp, Homo sapiens
  source 1..22: mol_type = other DNA
tcgtaacttctgatgctcatgg

SEQ ID NO: 4243 - DNA, 23 bp, Homo sapiens
  source 1..23: mol_type = other DNA
cattcaccactgcaagctcctgg

SEQ ID NO: 4244 - DNA, 23 bp, Homo sapiens
  source 1..23: mol_type = other DNA
aatatgcctgtgcatgctcaagg

SEQ ID NO: 4245 - DNA, 22 bp, Homo sapiens
  source 1..22: mol_type = other DNA
gaaacacctcccatgctcatgg

SEQ ID NO: 4246 - DNA, 21 bp, Homo sapiens
  source 1..21: mol_type = other DNA
aattcatctgcatgctcatgc

SEQ ID NO: 4247 - DNA, 23 bp, Homo sapiens
  source 1..23: mol_type = other DNA
aacagcactttgcatgctcaggg

SEQ ID NO: 4248 - DNA, 23 bp, Homo sapiens
  source 1..23: mol_type = other DNA
tccctaaccctgcatgcccaggg

SEQ ID NO: 4249 - DNA, 22 bp, Homo sapiens
  source 1..22: mol_type = other DNA
cagtcacctctcctgctcatgg

SEQ ID NO: 4250 - DNA, 23 bp, Homo sapiens
  source 1..23: mol_type = other DNA
tacacacacatgcatgctcacgc

SEQ ID NO: 4251 - DNA, 23 bp, Homo sapiens
  source 1..23: mol_type = other DNA
tacataccacagcatgcacatgg

SEQ ID NO: 4252 - DNA, 21 bp, Homo sapiens
  source 1..21: mol_type = other DNA
gatttacctgcatgctcaagg

SEQ ID NO: 4253 - DNA, 23 bp, Homo sapiens
  source 1..23: mol_type = other DNA
tgcaaacatatccatgctcatgg

SEQ ID NO: 4254 - DNA, 23 bp, Homo sapiens
  source 1..23: mol_type = other DNA
gagtcaactatgcatgctcccgg

SEQ ID NO: 4255 - DNA, 23 bp, Homo sapiens
  source 1..23: mol_type = other DNA
tattcacctctgtattaacaggg

SEQ ID NO: 4256 - DNA, 23 bp, Homo sapiens
  source 1..23: mol_type = other DNA
tccccacctgtgtatgccctggg

SEQ ID NO: 4257 - DNA, 24 bp, Homo sapiens
  source 1..24: mol_type = other DNA
cacacacccctgcatgtctcgggg

SEQ ID NO: 4258 - DNA, 22 bp, Homo sapiens
  source 1..22: mol_type = other DNA
tactcacctctgtgcttcaagg

SEQ ID NO: 4259 - DNA, 23 bp, Homo sapiens
  source 1..23: mol_type = other DNA
gggccacctctgcaggctcaagg

SEQ ID NO: 4260 - DNA, 23 bp, Homo sapiens
  source 1..23: mol_type = other DNA
tcaccaccactgcctgctcaggg

SEQ ID NO: 4261 - DNA, 22 bp, Homo sapiens
  source 1..22: mol_type = other DNA
cactggccactgcatctcatgg

SEQ ID NO: 4262 - DNA, 23 bp, Homo sapiens
  source 1..23: mol_type = other DNA
gcctaatctcaacatgctcaagg

SEQ ID NO: 4263 - DNA, 23 bp, Homo sapiens
  source 1..23: mol_type = other DNA
aattacccactgcatgttcatgg

SEQ ID NO: 4264 - DNA, 22 bp, Homo sapiens
  source 1..22: mol_type = other DNA
atcacaactctgcatctcatgg

SEQ ID NO: 4265 - DNA, 23 bp, Homo sapiens
  source 1..23: mol_type = other DNA
tgctcacctgcacatgctccaga

SEQ ID NO: 4266 - DNA, 23 bp, Homo sapiens
  source 1..23: mol_type = other DNA
ctcctacctctaaatgctcaggg

SEQ ID NO: 4267 - DNA, 22 bp, Homo sapiens
  source 1..22: mol_type = other DNA
gaaacatctctcatgctcatgg

SEQ ID NO: 4268 - DNA, 23 bp, Homo sapiens
  source 1..23: mol_type = other DNA
tgctcatctccacatgctcacag

SEQ ID NO: 4269 - DNA, 23 bp, Homo sapiens
  source 1..23: mol_type = other DNA
tcttcatgtctgcatgctcaggg

SEQ ID NO: 4270 - DNA, 23 bp, Homo sapiens
  source 1..23: mol_type = other DNA
acctcacttccgcatgctcaaag

SEQ ID NO: 4271 - DNA, 23 bp, Homo sapiens
  source 1..23: mol_type = other DNA
tgttcacacatgcatgctcacag

SEQ ID NO: 4272 - DNA, 22 bp, Homo sapiens
  source 1..22: mol_type = other DNA
caagcacctcagcagctcatgg

SEQ ID NO: 4273 - DNA, 23 bp, Homo sapiens
  source 1..23: mol_type = other DNA
tactcatctctgcatgtttatag

SEQ ID NO: 4274 - DNA, 22 bp, Homo sapiens
  source 1..22: mol_type = other DNA
ctctcaacactgcatctcaagg

SEQ ID NO: 4275 - DNA, 23 bp, Homo sapiens
  source 1..23: mol_type = other DNA
tcctcacccctgcatgctccagc

SEQ ID NO: 4276 - DNA, 22 bp, Homo sapiens
  source 1..22: mol_type = other DNA
tactgacactgcatgctccaag

SEQ ID NO: 4277 - DNA, 22 bp, Homo sapiens
  source 1..22: mol_type = other DNA
gaatcacatcccatgctcatgg

SEQ ID NO: 4278 - DNA, 23 bp, Homo sapiens
  source 1..23: mol_type = other DNA
tcgtcacctctacatctccaggg

SEQ ID NO: 4279 - DNA, 24 bp, Homo sapiens
  source 1..24: mol_type = other DNA
tactaacattttgcatgctcacag

SEQ ID NO: 4280 - DNA, 22 bp, Homo sapiens
  source 1..22: mol_type = other DNA
tacccacctctctagctctagg

SEQ ID NO: 4281 - DNA, 22 bp, Homo sapiens
  source 1..22: mol_type = other DNA
tactcccgctgaaggctctagg

SEQ ID NO: 4282 - DNA, 23 bp, Homo sapiens
  source 1..23: mol_type = other DNA
aattcacttctgcatgcttgggg

SEQ ID NO: 4283 - DNA, 22 bp, Homo sapiens
  source 1..22: mol_type = other DNA
tactcacacagcttgctcaaga

SEQ ID NO: 4284 - DNA, 23 bp, Homo sapiens
  source 1..23: mol_type = other DNA
taaaaacctctgcatgcccgagg

SEQ ID NO: 4285 - DNA, 22 bp, Homo sapiens
  source 1..22: mol_type = other DNA
cactcacaatgcatgctcaagt

SEQ ID NO: 4286 - DNA, 23 bp, Homo sapiens
  source 1..23: mol_type = other DNA
cactaccttctgcatgctttggg

SEQ ID NO: 4287 - DNA, 23 bp, Homo sapiens
  source 1..23: mol_type = other DNA
tattctcctctgtatgtccatgt

SEQ ID NO: 4288 - DNA, 24 bp, Homo sapiens
  source 1..24: mol_type = other DNA
gactcaaactctgcataatcatgg

SEQ ID NO: 4289 - DNA, 22 bp, Homo sapiens
  source 1..22: mol_type = other DNA
taaaaacctcccatgctcatgg

SEQ ID NO: 4290 - DNA, 23 bp, Homo sapiens
  source 1..23: mol_type = other DNA
atcacacagctgcatgctcagtg

SEQ ID NO: 4291 - DNA, 23 bp, Homo sapiens
  source 1..23: mol_type = other DNA
aactcacctttgtatactcacag

SEQ ID NO: 4292 - DNA, 23 bp, Homo sapiens
  source 1..23: mol_type = other DNA
tgcttacctctgcagccccatgg

SEQ ID NO: 4293 - DNA, 24 bp, Homo sapiens
  source 1..24: mol_type = other DNA
agctcacctctgccatcctcatgg

SEQ ID NO: 4294 - DNA, 22 bp, Homo sapiens
  source 1..22: mol_type = other DNA
tgctcaccactgctgctcctgg

SEQ ID NO: 4295 - DNA, 22 bp, Homo sapiens
  source 1..22: mol_type = other DNA
atcccacctcagctgctcaagg

SEQ ID NO: 4296 - DNA, 23 bp, Homo sapiens
  source 1..23: mol_type = other DNA
tcctatactctgcatacttaagg

SEQ ID NO: 4297 - DNA, 23 bp, Homo sapiens
  source 1..23: mol_type = other DNA
tattcactactgcatgccaagtg

SEQ ID NO: 4298 - DNA, 23 bp, Homo sapiens
  source 1..23: mol_type = other DNA
tattcatctctgcatgcttcatg

SEQ ID NO: 4299 - DNA, 23 bp, Homo sapiens
  source 1..23: mol_type = other DNA
taagcacagctgaatgcttatgg

SEQ ID NO: 4300 - DNA, 23 bp, Homo sapiens
  source 1..23: mol_type = other DNA
tacacatatctacatgcccatgg

SEQ ID NO: 4301 - DNA, 23 bp, Homo sapiens
  source 1..23: mol_type = other DNA
taatactatcagcatgctcaggg

SEQ ID NO: 4302 - DNA, 22 bp, Homo sapiens
  source 1..22: mol_type = other DNA
aacacacctctgaagctcagag

SEQ ID NO: 4303 - DNA, 23 bp, Homo sapiens
  source 1..23: mol_type = other DNA
ttatcacctctgaatgtccatgg

SEQ ID NO: 4304 - DNA, 22 bp, Homo sapiens
  source 1..22: mol_type = other DNA
gactaactcagcatgttcaggg

SEQ ID NO: 4305 - DNA, 22 bp, Homo sapiens
  source 1..22: mol_type = other DNA
tgctcacctctcaagttcaagg

SEQ ID NO: 4306 - DNA, 22 bp, Homo sapiens
  source 1..22: mol_type = other DNA
aactcaccactcatgctaagga

SEQ ID NO: 4307 - DNA, 22 bp, Homo sapiens
  source 1..22: mol_type = other DNA
tactatatctgcatacacaggg

SEQ ID NO: 4308 - DNA, 22 bp, Homo sapiens
  source 1..22: mol_type = other DNA
cactcattactgatgctcatgg

SEQ ID NO: 4309 - DNA, 23 bp, Homo sapiens
  source 1..23: mol_type = other DNA
tagtcacctctgccttcgtactg

SEQ ID NO: 4310 - DNA, 23 bp, Homo sapiens
  source 1..23: mol_type = other DNA
tattcaatgttgtatgctcatgg

SEQ ID NO: 4311 - DNA, 24 bp, Homo sapiens
  source 1..24: mol_type = other DNA
tactcaccaaatgcatgcccacgt

SEQ ID NO: 4312 - DNA, 22 bp, Homo sapiens
  source 1..22: mol_type = other DNA
tactacctatgtttgctcaatg

SEQ ID NO: 4313 - DNA, 22 bp, Homo sapiens
  source 1..22: mol_type = other DNA
cacccacctctgcctctcaaag

SEQ ID NO: 4314 - DNA, 23 bp, Homo sapiens
  source 1..23: mol_type = other DNA
tacacattattccatgctcatgg

SEQ ID NO: 4315 - DNA, 22 bp, Homo sapiens
  source 1..22: mol_type = other DNA
tacccacctcggcctctcaaag

SEQ ID NO: 4316 - DNA, 23 bp, Homo sapiens
  source 1..23: mol_type = other DNA
tactcatctctgcaatgccagga

SEQ ID NO: 4317 - DNA, 23 bp, Homo sapiens
  source 1..23: mol_type = other DNA
tattcactgctgtatcctcaggc

SEQ ID NO: 4318 - DNA, 23 bp, Homo sapiens
  source 1..23: mol_type = other DNA
cactcaagtctgcattctcaata

SEQ ID NO: 4319 - DNA, 23 bp, Homo sapiens
  source 1..23: mol_type = other DNA
tactcaactctgcatttgtagtg

SEQ ID NO: 4320 - DNA, 25 bp, Homo sapiens
  source 1..25: mol_type = other DNA
acctcacctctgcatggcttcagtg

SEQ ID NO: 4321 - DNA, 22 bp, Homo sapiens
  source 1..22: mol_type = other DNA
tactgacttctgcagtctaggg

SEQ ID NO: 4322 - DNA, 23 bp, Homo sapiens
  source 1..23: mol_type = other DNA
tactcacatctgtgttctcaagc

SEQ ID NO: 4323 - DNA, 23 bp, Homo sapiens
  source 1..23: mol_type = other DNA
tatttagctctgcctggtcatgc

SEQ ID NO: 4324 - DNA, 24 bp, Homo sapiens
  source 1..24: mol_type = other DNA
ttctatcactctgcatcctcaagg

SEQ ID NO: 4325 - DNA, 25 bp, Homo sapiens
  source 1..25: mol_type = other DNA
tactcagaactgcagatgctcaagt

SEQ ID NO: 4326 - DNA, 22 bp, Homo sapiens
  source 1..22: mol_type = other DNA
ctctcacctctgcatgacaagc

SEQ ID NO: 4327 - DNA, 22 bp, Homo sapiens
  source 1..22: mol_type = other DNA
tactcacaatgcatgctaaagg

SEQ ID NO: 4328 - DNA, 23 bp, Homo sapiens
  source 1..23: mol_type = other DNA
cagtatcctctccatgctcagag

SEQ ID NO: 4329 - DNA, 23 bp, Homo sapiens
  source 1..23: mol_type = other DNA
tttatacctaagcatgctcaggg

SEQ ID NO: 4330 - DNA, 24 bp, Homo sapiens
  source 1..24: mol_type = other DNA
cacacacactctgcatgctctcga

SEQ ID NO: 4331 - DNA, 23 bp, Homo sapiens
  source 1..23: mol_type = other DNA
tactctactttgcatgctgacgg

SEQ ID NO: 4332 - DNA, 22 bp, Homo sapiens
  source 1..22: mol_type = other DNA
aactcacctacaatgctcatgg

SEQ ID NO: 4333 - DNA, 23 bp, Homo sapiens
  source 1..23: mol_type = other DNA
tgcccacccctgcatgcacacgg

SEQ ID NO: 4334 - DNA, 23 bp, Homo sapiens
  source 1..23: mol_type = other DNA
tactcacctctgcattctccagc

SEQ ID NO: 4335 - DNA, 22 bp, Homo sapiens
  source 1..22: mol_type = other DNA
acctcacccagcatgctcctgg

SEQ ID NO: 4336 - DNA, 23 bp, Homo sapiens
  source 1..23: mol_type = other DNA
aactctaatctgcatgctcaaga

SEQ ID NO: 4337 - DNA, 22 bp, Homo sapiens
  source 1..22: mol_type = other DNA
acatcacctctgatgatcatgg

SEQ ID NO: 4338 - DNA, 23 bp, Homo sapiens
  source 1..23: mol_type = other DNA
tacacacatccacatgctcaggg

SEQ ID NO: 4339 - DNA, 22 bp, Homo sapiens
  source 1..22: mol_type = other DNA
tactgacccagcatgctccagg

SEQ ID NO: 4340 - DNA, 23 bp, Homo sapiens
  source 1..23: mol_type = other DNA
agctcacctctgcatgtgcagag

SEQ ID NO: 4341 - DNA, 22 bp, Homo sapiens
  source 1..22: mol_type = other DNA
gactcaccgctgctgctcaggg

SEQ ID NO: 4342 - DNA, 22 bp, Homo sapiens
  source 1..22: mol_type = other DNA
ttctaactctacatgcccaggg

SEQ ID NO: 4343 - DNA, 23 bp, Homo sapiens
  source 1..23: mol_type = other DNA
tactcattcctgcattctcatgg

SEQ ID NO: 4344 - DNA, 23 bp, Homo sapiens
  source 1..23: mol_type = other DNA
gactcttcactgcatgctcttgg

SEQ ID NO: 4345 - DNA, 23 bp, Homo sapiens
  source 1..23: mol_type = other DNA
acataacctctgcatgcccaaag

SEQ ID NO: 4346 - DNA, 23 bp, Homo sapiens
  source 1..23: mol_type = other DNA
gtctgtcctatgcatgctccagg

SEQ ID NO: 4347 - DNA, 21 bp, Homo sapiens
  source 1..21: mol_type = other DNA
tgctcatcagcatgctcatgg

SEQ ID NO: 4348 - DNA, 22 bp, Homo sapiens
  source 1..22: mol_type = other DNA
gaatcacactccatgctcatgg

SEQ ID NO: 4349 - DNA, 23 bp, Homo sapiens
  source 1..23: mol_type = other DNA
gcctcacctctggatgcccaagg

SEQ ID NO: 4350 - DNA, 23 bp, Homo sapiens
  source 1..23: mol_type = other DNA
taccaacatctgcatgcttatgg

SEQ ID NO: 4351 - DNA, 23 bp, Homo sapiens
  source 1..23: mol_type = other DNA
tatactcctctgtatgcacatgg

SEQ ID NO: 4352 - DNA, 23 bp, Homo sapiens
  source 1..23: mol_type = other DNA
tttatacctttgcatgctcatag

SEQ ID NO: 4353 - DNA, 23 bp, Homo sapiens
  source 1..23: mol_type = other DNA
caagtacctctgcttgcccaggg

SEQ ID NO: 4354 - DNA, 23 bp, Homo sapiens
  source 1..23: mol_type = other DNA
tactcatctctgtatcccaaggc

SEQ ID NO: 4355 - DNA, 23 bp, Homo sapiens
  source 1..23: mol_type = other DNA
cactcacctccgcatcccaaagt

SEQ ID NO: 4356 - DNA, 22 bp, Homo sapiens
  source 1..22: mol_type = other DNA
ttgccaccactgcatctcaggg

SEQ ID NO: 4357 - DNA, 23 bp, Homo sapiens
  source 1..23: mol_type = other DNA
tgttcaccactgtatgctcagtg

SEQ ID NO: 4358 - DNA, 23 bp, Homo sapiens
  source 1..23: mol_type = other DNA
gagaaacccctgcatgctcagga

SEQ ID NO: 4359 - DNA, 23 bp, Homo sapiens
  source 1..23: mol_type = other DNA
gtgtatcctctgcctgctcaggg

SEQ ID NO: 4360 - DNA, 23 bp, Homo sapiens
  source 1..23: mol_type = other DNA
tactcaccccagcatgctcttct

SEQ ID NO: 4361 - DNA, 21 bp, Homo sapiens
  source 1..21: mol_type = other DNA
tattcatatgcatgctcacag

SEQ ID NO: 4362 - DNA, 22 bp, Homo sapiens
  source 1..22: mol_type = other DNA
tactatcctctcatgctcagtg

SEQ ID NO: 4363 - DNA, 23 bp, Homo sapiens
  source 1..23: mol_type = other DNA
ggcacacctctgcatgcttggtg

SEQ ID NO: 4364 - DNA, 23 bp, Homo sapiens
  source 1..23: mol_type = other DNA
tcctacactcagcatgcacatgg

SEQ ID NO: 4365 - DNA, 24 bp, Homo sapiens
  source 1..24: mol_type = other DNA
ttcttatctctgcatggctcatga

SEQ ID NO: 4366 - DNA, 21 bp, Homo sapiens
  source 1..21: mol_type = other DNA
tcctcacctctgtgctcaagg

SEQ ID NO: 4367 - DNA, 22 bp, Homo sapiens
  source 1..22: mol_type = other DNA
cactccctctgcatgcacatgc

SEQ ID NO: 4368 - DNA, 21 bp, Homo sapiens
  source 1..21: mol_type = other DNA
tgatcacctctgcactcatgg

SEQ ID NO: 4369 - DNA, 23 bp, Homo sapiens
  source 1..23: mol_type = other DNA
ttttaaactcaacatgctcatgg

SEQ ID NO: 4370 - DNA, 22 bp, Homo sapiens
  source 1..22: mol_type = other DNA
tttgcacctctgcaggtcaggg

SEQ ID NO: 4371 - DNA, 23 bp, Homo sapiens
  source 1..23: mol_type = other DNA
tacccacctctgcaagcccctgg

SEQ ID NO: 4372 - DNA, 21 bp, Homo sapiens
  source 1..21: mol_type = other DNA
gtctcacctccatgctcctgg

SEQ ID NO: 4373 - DNA, 23 bp, Homo sapiens
  source 1..23: mol_type = other DNA
aactgatctctgcatgcaccagg

SEQ ID NO: 4374 - DNA, 23 bp, Homo sapiens
  source 1..23: mol_type = other DNA
tgtacacccctgcacgctcatag

SEQ ID NO: 4375 - DNA, 23 bp, Homo sapiens
  source 1..23: mol_type = other DNA
ttcatatatctgcttgctcaggg

SEQ ID NO: 4376 - DNA, 22 bp, Homo sapiens
  source 1..22: mol_type = other DNA
tacccagtctgcatgcccagag

SEQ ID NO: 4377 - DNA, 22 bp, Homo sapiens
  source 1..22: mol_type = other DNA
taatacacctgcatgttcacgg

SEQ ID NO: 4378 - DNA, 23 bp, Homo sapiens
  source 1..23: mol_type = other DNA
aactcaccacttcattcttaatg

SEQ ID NO: 4379 - DNA, 22 bp, Homo sapiens
  source 1..22: mol_type = other DNA
ttatcacctctgcatctactgg

SEQ ID NO: 4380 - DNA, 24 bp, Homo sapiens
  source 1..24: mol_type = other DNA
tgcccaccctcagcatgctcagag

SEQ ID NO: 4381 - DNA, 22 bp, Homo sapiens
  source 1..22: mol_type = other DNA
aactctctccgcatgctcaggg

SEQ ID NO: 4382 - DNA, 23 bp, Homo sapiens
  source 1..23: mol_type = other DNA
ctcccatctctgcatgctccctg

SEQ ID NO: 4383 - DNA, 23 bp, Homo sapiens
  source 1..23: mol_type = other DNA
tccctaaccctgcatgcccaagg

SEQ ID NO: 4384 - DNA, 21 bp, Homo sapiens
  source 1..21: mol_type = other DNA
tacacacctgcaaactcaggg

SEQ ID NO: 4385 - DNA, 23 bp, Homo sapiens
  source 1..23: mol_type = other DNA
cactcacggcttcatgctgaaga

SEQ ID NO: 4386 - DNA, 22 bp, Homo sapiens
  source 1..22: mol_type = other DNA
ggcccacctctcatgctaaagg

SEQ ID NO: 4387 - DNA, 23 bp, Homo sapiens
  source 1..23: mol_type = other DNA
ccttgacctctccatgctcagga

SEQ ID NO: 4388 - DNA, 23 bp, Homo sapiens
  source 1..23: mol_type = other DNA
tatgtaccacagcatgcttacgg

SEQ ID NO: 4389 - DNA, 22 bp, Homo sapiens
  source 1..22: mol_type = other DNA
tgttcaccctgcatgctcatac

SEQ ID NO: 4390 - DNA, 23 bp, Homo sapiens
  source 1..23: mol_type = other DNA
atcccttctctgcatgctcatgt

SEQ ID NO: 4391 - DNA, 23 bp, Homo sapiens
  source 1..23: mol_type = other DNA
aactaaacactgcatactcatgg

SEQ ID NO: 4392 - DNA, 23 bp, Homo sapiens
  source 1..23: mol_type = other DNA
tgctcacctctgtgtgttcatgt

SEQ ID NO: 4393 - DNA, 24 bp, Homo sapiens
  source 1..24: mol_type = other DNA
tagtccactactgcatgctcaatg

SEQ ID NO: 4394 - DNA, 23 bp, Homo sapiens
  source 1..23: mol_type = other DNA
tccacactcctacatgctcatga

SEQ ID NO: 4395 - DNA, 23 bp, Homo sapiens
  source 1..23: mol_type = other DNA
tactaaactctacatgccctggg

SEQ ID NO: 4396 - DNA, 23 bp, Homo sapiens
  source 1..23: mol_type = other DNA
ccgtcacctcacaatgctcatgg

SEQ ID NO: 4397 - DNA, 22 bp, Homo sapiens
  source 1..22: mol_type = other DNA
taatcacactgcttgctcagtg

SEQ ID NO: 4398 - DNA, 22 bp, Homo sapiens
  source 1..22: mol_type = other DNA
cactacctctcctggctcatgg

SEQ ID NO: 4399 - DNA, 23 bp, Homo sapiens
  source 1..23: mol_type = other DNA
ttctctctcatgcatgcccacgg

SEQ ID NO: 4400 - DNA, 22 bp, Homo sapiens
  source 1..22: mol_type = other DNA
tacctcacctgcctgctcatgg

SEQ ID NO: 4401 - DNA, 22 bp, Homo sapiens
  source 1..22: mol_type = other DNA
ttctcaccctgcatgctcccgt

SEQ ID NO: 4402 - DNA, 23 bp, Homo sapiens
  source 1..23: mol_type = other DNA
cagtgacctctacatgttcaagt

SEQ ID NO: 4403 - DNA, 23 bp, Homo sapiens
  source 1..23: mol_type = other DNA
tccccaacacagcatactcaggg

SEQ ID NO: 4404 - DNA, 21 bp, Homo sapiens
  source 1..21: mol_type = other DNA
ttctcatctgcatgtacaagg

SEQ ID NO: 4405 - DNA, 21 bp, Homo sapiens
  source 1..21: mol_type = other DNA
tactcacatctgcatgtatgt

SEQ ID NO: 4406 - DNA, 23 bp, Homo sapiens
  source 1..23: mol_type = other DNA
tagacacaccttcatgctcgtgg

SEQ ID NO: 4407 - DNA, 22 bp, Homo sapiens
  source 1..22: mol_type = other DNA
gaaacacctctcctgctcatgg

SEQ ID NO: 4408 - DNA, 21 bp, Homo sapiens
  source 1..21: mol_type = other DNA
tactcagctctgcatttagag

SEQ ID NO: 4409 - DNA, 23 bp, Homo sapiens
  source 1..23: mol_type = other DNA
taccagcctcttcatgctcctga

SEQ ID NO: 4410 - DNA, 23 bp, Homo sapiens
  source 1..23: mol_type = other DNA
tacttacctctgtaatcccagcg

SEQ ID NO: 4411 - DNA, 23 bp, Homo sapiens
  source 1..23: mol_type = other DNA
taataacatcatcatgctcacgg

SEQ ID NO: 4412 - DNA, 22 bp, Homo sapiens
  source 1..22: mol_type = other DNA
tactgcctatgtttgctcaagg

SEQ ID NO: 4413 - DNA, 22 bp, Homo sapiens
  source 1..22: mol_type = other DNA
cactcacccctgcagctaatgt

SEQ ID NO: 4414 - DNA, 23 bp, Homo sapiens
  source 1..23: mol_type = other DNA
tcctcacctctgccttgtagagg

SEQ ID NO: 4415 - DNA, 23 bp, Homo sapiens
  source 1..23: mol_type = other DNA
tacccacttcatcatgctccatg

SEQ ID NO: 4416 - DNA, 23 bp, Homo sapiens
  source 1..23: mol_type = other DNA
ctctcatctctgtttgctcaagg

SEQ ID NO: 4417 - DNA, 23 bp, Homo sapiens
  source 1..23: mol_type = other DNA
aaggcacaactggatgctcaagg

SEQ ID NO: 4418 - DNA, 23 bp, Homo sapiens
  source 1..23: mol_type = other DNA
tagctacttctgcatgcttttgg

SEQ ID NO: 4419 - DNA, 23 bp, Homo sapiens
  source 1..23: mol_type = other DNA
caatcccatctacatgttcatgg

SEQ ID NO: 4420 - DNA, 23 bp, Homo sapiens
  source 1..23: mol_type = other DNA
caccccgctctgcgggctcacgg

SEQ ID NO: 4421 - DNA, 23 bp, Homo sapiens
  source 1..23: mol_type = other DNA
tactcacatctgtaatctcaaaa

SEQ ID NO: 4422 - DNA, 22 bp, Homo sapiens
  source 1..22: mol_type = other DNA
ttcttcctatccatgctcatgg

SEQ ID NO: 4423 - DNA, 22 bp, Homo sapiens
  source 1..22: mol_type = other DNA
cactcacctctcttgcgcatgg

SEQ ID NO: 4424 - DNA, 22 bp, Homo sapiens
  source 1..22: mol_type = other DNA
cacccacctcagcatctcaaag

SEQ ID NO: 4425 - DNA, 22 bp, Homo sapiens
  source 1..22: mol_type = other DNA
taatacctctgcatgctgcagt

SEQ ID NO: 4426 - DNA, 23 bp, Homo sapiens
  source 1..23: mol_type = other DNA
aactcccctctgcctggaccagg

SEQ ID NO: 4427 - DNA, 23 bp, Homo sapiens
  source 1..23: mol_type = other DNA
cacacacatatgcatgcacatgg

SEQ ID NO: 4428 - DNA, 23 bp, Homo sapiens
  source 1..23: mol_type = other DNA
cactcacctcagcctccccaagt

SEQ ID NO: 4429 - DNA, 23 bp, Homo sapiens
  source 1..23: mol_type = other DNA
tactcacatctgcctcctcccac

SEQ ID NO: 4430 - DNA, 22 bp, Homo sapiens
  source 1..22: mol_type = other DNA
ctctcacctcggcatcccaagg

SEQ ID NO: 4431 - DNA, 23 bp, Homo sapiens
  source 1..23: mol_type = other DNA
tattcaattatgcatgcttatgt

SEQ ID NO: 4432 - DNA, 23 bp, Homo sapiens
  source 1..23: mol_type = other DNA
atctcacatctccatgctctatg

SEQ ID NO: 4433 - DNA, 23 bp, Homo sapiens
  source 1..23: mol_type = other DNA
tactacctcctgcatgctcatgc

SEQ ID NO: 4434 - DNA, 22 bp, Homo sapiens
  source 1..22: mol_type = other DNA
aaatcacctctgcatgcctggt

SEQ ID NO: 4435 - DNA, 21 bp, Homo sapiens
  source 1..21: mol_type = other DNA
tacagctcttgatgctcaagg

SEQ ID NO: 4436 - DNA, 22 bp, Homo sapiens
  source 1..22: mol_type = other DNA
cgctcacctctgcctcccaagg

SEQ ID NO: 4437 - DNA, 23 bp, Homo sapiens
  source 1..23: mol_type = other DNA
tactcacctcggcgtcccaaagc

SEQ ID NO: 4438 - DNA, 22 bp, Homo sapiens
  source 1..22: mol_type = other DNA
tactacctatacaagcccatgg

SEQ ID NO: 4439 - DNA, 21 bp, Homo sapiens
  source 1..21: mol_type = other DNA
tactctcctccatgcacagtg

SEQ ID NO: 4440 - DNA, 23 bp, Homo sapiens
  source 1..23: mol_type = other DNA
tgcccatctctgcctgctggagg

SEQ ID NO: 4441 - DNA, 23 bp, Homo sapiens
  source 1..23: mol_type = other DNA
gacacaacattccatgctcatgg

SEQ ID NO: 4442 - DNA, 23 bp, Homo sapiens
  source 1..23: mol_type = other DNA
ggttcaccactgcatcttcaggg

SEQ ID NO: 4443 - DNA, 25 bp, Homo sapiens
  source 1..25: mol_type = other DNA
ggctcacctctgcatttgctcaaga

SEQ ID NO: 4444 - DNA, 21 bp, Homo sapiens
  source 1..21: mol_type = other DNA
tacccacctctattgtcaagg

SEQ ID NO: 4445 - DNA, 22 bp, Homo sapiens
  source 1..22: mol_type = other DNA
cactcacattgcatgctcaaag

SEQ ID NO: 4446 - DNA, 23 bp, Homo sapiens
  source 1..23: mol_type = other DNA
tactcaccactgcatcccaagga

SEQ ID NO: 4447 - DNA, 24 bp, Homo sapiens
  source 1..24: mol_type = other DNA
tcctcttactctacatgctcatgg

SEQ ID NO: 4448 - DNA, 23 bp, Homo sapiens
  source 1..23: mol_type = other DNA
tactcaccccttcatgtcagggg

SEQ ID NO: 4449 - DNA, 23 bp, Homo sapiens
  source 1..23: mol_type = other DNA
tattcacatctgcatgcatagag

SEQ ID NO: 4450 - DNA, 22 bp, Homo sapiens
  source 1..22: mol_type = other DNA
tactcaactctgctgctctagg

SEQ ID NO: 4451 - DNA, 23 bp, Homo sapiens
  source 1..23: mol_type = other DNA
cattcaccactgcatgcccaaag

SEQ ID NO: 4452 - DNA, 21 bp, Homo sapiens
  source 1..21: mol_type = other DNA
ttctcacatgcatgctcagtg

SEQ ID NO: 4453 - DNA, 22 bp, Homo sapiens
  source 1..22: mol_type = other DNA
cacttaccctacatgctcaaag

SEQ ID NO: 4454 - DNA, 22 bp, Homo sapiens
  source 1..22: mol_type = other DNA
tattcacctctgcatctcagtg

SEQ ID NO: 4455 - DNA, 22 bp, Homo sapiens
  source 1..22: mol_type = other DNA
tacccacctcagcatcccacgg

SEQ ID NO: 4456 - DNA, 22 bp, Homo sapiens
  source 1..22: mol_type = other DNA
ttctcacctccacatctcaagg

SEQ ID NO: 4457 - DNA, 22 bp, Homo sapiens
  source 1..22: mol_type = other DNA
tactcactatgcatgcattagg

SEQ ID NO: 4458 - DNA, 23 bp, Homo sapiens
  source 1..23: mol_type = other DNA
aatgtacctctgcatgccctagg

SEQ ID NO: 4459 - DNA, 24 bp, Homo sapiens
  source 1..24: mol_type = other DNA
tactcaccaactgcatggtcaggg

SEQ ID NO: 4460 - DNA, 24 bp, Homo sapiens
  source 1..24: mol_type = other DNA
tgctatactctagcatgctcatgg

SEQ ID NO: 4461 - DNA, 22 bp, Homo sapiens
  source 1..22: mol_type = other DNA
tactctctctgcttgctctttg

SEQ ID NO: 4462 - DNA, 23 bp, Homo sapiens
  source 1..23: mol_type = other DNA
catacacccctgcatgtacacgg

SEQ ID NO: 4463 - DNA, 23 bp, Homo sapiens
  source 1..23: mol_type = other DNA
caggcaccactgcatgctcctgg

SEQ ID NO: 4464 - DNA, 22 bp, Homo sapiens
  source 1..22: mol_type = other DNA
cactcacctctcatgctcacac

SEQ ID NO: 4465 - DNA, 23 bp, Homo sapiens
  source 1..23: mol_type = other DNA
tacacatacatgcatgctcttgg

SEQ ID NO: 4466 - DNA, 23 bp, Homo sapiens
  source 1..23: mol_type = other DNA
tacctacctctgcatcctcaggg

SEQ ID NO: 4467 - DNA, 23 bp, Homo sapiens
  source 1..23: mol_type = other DNA
tactcacgtctgcacgcttctgg

SEQ ID NO: 4468 - DNA, 23 bp, Homo sapiens
  source 1..23: mol_type = other DNA
tacccacctctgctaacccaagg

SEQ ID NO: 4469 - DNA, 22 bp, Homo sapiens
  source 1..22: mol_type = other DNA
cccacacctctgctgcccaagg

SEQ ID NO: 4470 - DNA, 21 bp, Homo sapiens
  source 1..21: mol_type = other DNA
tattcctctccatgcccaagg

SEQ ID NO: 4471 - DNA, 22 bp, Homo sapiens
  source 1..22: mol_type = other DNA
tactcacagggcaagctcatgg

SEQ ID NO: 4472 - DNA, 23 bp, Homo sapiens
  source 1..23: mol_type = other DNA
tcttctcctaagcatgctcagga

SEQ ID NO: 4473 - DNA, 22 bp, Homo sapiens
  source 1..22: mol_type = other DNA
ttgccacccctgcagctcatgg

SEQ ID NO: 4474 - DNA, 23 bp, Homo sapiens
  source 1..23: mol_type = other DNA
taatccactctgcttgctcaagg

SEQ ID NO: 4475 - DNA, 22 bp, Homo sapiens
  source 1..22: mol_type = other DNA
gaatcacctttgcatctcaggg

SEQ ID NO: 4476 - DNA, 23 bp, Homo sapiens
  source 1..23: mol_type = other DNA
tactccactctgcatgtcaatgt

SEQ ID NO: 4477 - DNA, 22 bp, Homo sapiens
  source 1..22: mol_type = other DNA
atttcacctctgcatgccacag

SEQ ID NO: 4478 - DNA, 23 bp, Homo sapiens
  source 1..23: mol_type = other DNA
cacacctctctacatgctcactg

SEQ ID NO: 4479 - DNA, 23 bp, Homo sapiens
  source 1..23: mol_type = other DNA
aatatgcatctgcatgctcaagg

SEQ ID NO: 4480 - DNA, 21 bp, Homo sapiens
  source 1..21: mol_type = other DNA
cacccacccccatgctcacgg

SEQ ID NO: 4481 - DNA, 23 bp, Homo sapiens
  source 1..23: mol_type = other DNA
ccctcacatacacatgctcatgg

SEQ ID NO: 4482 - DNA, 23 bp, Homo sapiens
  source 1..23: mol_type = other DNA
atctcacctctccaagcttatgg

SEQ ID NO: 4483 - DNA, 23 bp, Homo sapiens
  source 1..23: mol_type = other DNA
tatttcactctgcatgttcatga

SEQ ID NO: 4484 - DNA, 21 bp, Homo sapiens
  source 1..21: mol_type = other DNA
tcattacctccatgctcatgg

SEQ ID NO: 4485 - DNA, 23 bp, Homo sapiens
  source 1..23: mol_type = other DNA
tacccacctctgcctcccaaggt

SEQ ID NO: 4486 - DNA, 24 bp, Homo sapiens
  source 1..24: mol_type = other DNA
tacttgactctggcatgctcaggg

SEQ ID NO: 4487 - DNA, 22 bp, Homo sapiens
  source 1..22: mol_type = other DNA
cactcacctgccatgttcacgg

SEQ ID NO: 4488 - DNA, 22 bp, Homo sapiens
  source 1..22: mol_type = other DNA
tactcacctatcaagctcagga

SEQ ID NO: 4489 - DNA, 23 bp, Homo sapiens
  source 1..23: mol_type = other DNA
cactcatctctacatgaacaagg

SEQ ID NO: 4490 - DNA, 23 bp, Homo sapiens
  source 1..23: mol_type = other DNA
cactcacctctgcatgcccagct

SEQ ID NO: 4491 - DNA, 23 bp, Homo sapiens
  source 1..23: mol_type = other DNA
ttattacctctgtaggctcagag

SEQ ID NO: 4492 - DNA, 23 bp, Homo sapiens
  source 1..23: mol_type = other DNA
taatcaccactgcatgtgcccgg

SEQ ID NO: 4493 - DNA, 22 bp, Homo sapiens
  source 1..22: mol_type = other DNA
taataactttgcatgttcatgg

SEQ ID NO: 4494 - DNA, 22 bp, Homo sapiens
  source 1..22: mol_type = other DNA
cactccctctgcatgttcctgg

SEQ ID NO: 4495 - DNA, 23 bp, Homo sapiens
  source 1..23: mol_type = other DNA
gaccatccattgcatgctcaagg

SEQ ID NO: 4496 - DNA, 22 bp, Homo sapiens
  source 1..22: mol_type = other DNA
gacacagtctgtatgctcatgg

SEQ ID NO: 4497 - DNA, 23 bp, Homo sapiens
  source 1..23: mol_type = other DNA
ctcccaccactgcatgctgaagg

SEQ ID NO: 4498 - DNA, 23 bp, Homo sapiens
  source 1..23: mol_type = other DNA
tcatcaccactgcctgctcacag

SEQ ID NO: 4499 - DNA, 23 bp, Homo sapiens
  source 1..23: mol_type = other DNA
gtgtgacctctgcatgttcatga

SEQ ID NO: 4500 - DNA, 23 bp, Homo sapiens
  source 1..23: mol_type = other DNA
tattcacttctccatgctcacag

SEQ ID NO: 4501 - DNA, 22 bp, Homo sapiens
  source 1..22: mol_type = other DNA
gagtgactctgcatgcttaagg

SEQ ID NO: 4502 - DNA, 23 bp, Homo sapiens
  source 1..23: mol_type = other DNA
tgttcctcagtgcatgctcatgg

SEQ ID NO: 4503 - DNA, 22 bp, Homo sapiens
  source 1..22: mol_type = other DNA
cgttcacttctgcatgtcaagg

SEQ ID NO: 4504 - DNA, 23 bp, Homo sapiens
  source 1..23: mol_type = other DNA
ttccagcctctgcatggtcatgg

SEQ ID NO: 4505 - DNA, 23 bp, Homo sapiens
  source 1..23: mol_type = other DNA
ttctagagtctgcatgctcttgg

SEQ ID NO: 4506 - DNA, 22 bp, Homo sapiens
  source 1..22: mol_type = other DNA
aacccaccctgcatgctctggt

SEQ ID NO: 4507 - DNA, 22 bp, Homo sapiens
  source 1..22: mol_type = other DNA
acatcagctctgcagctcaggg

SEQ ID NO: 4508 - DNA, 22 bp, Homo sapiens
  source 1..22: mol_type = other DNA
tgctcacttctgcatctcaaag

SEQ ID NO: 4509 - DNA, 23 bp, Homo sapiens
  source 1..23: mol_type = other DNA
cacacacttctacatactcaagg

SEQ ID NO: 4510 - DNA, 22 bp, Homo sapiens
  source 1..22: mol_type = other DNA
ctctcacctcagcatctcaaga

SEQ ID NO: 4511 - DNA, 21 bp, Homo sapiens
  source 1..21: mol_type = other DNA
gacacacctgcatgcacaagg

SEQ ID NO: 4512 - DNA, 23 bp, Homo sapiens
  source 1..23: mol_type = other DNA
gtttcaccttggcatgctcaaag

SEQ ID NO: 4513 - DNA, 23 bp, Homo sapiens
  source 1..23: mol_type = other DNA
tcctcaccattgtacgctcaggg

SEQ ID NO: 4514 - DNA, 22 bp, Homo sapiens
  source 1..22: mol_type = other DNA
cacccacctcagcatcccaagg

SEQ ID NO: 4515 - DNA, 23 bp, Homo sapiens
  source 1..23: mol_type = other DNA
tacagacttatacatgctctggg

SEQ ID NO: 4516 - DNA, 23 bp, Homo sapiens
  source 1..23: mol_type = other DNA
tacccacatctccatgctccatc

SEQ ID NO: 4517 - DNA, 22 bp, Homo sapiens
  source 1..22: mol_type = other DNA
tgccacgtgtgtatgctcaggg

SEQ ID NO: 4518 - DNA, 22 bp, Homo sapiens
  source 1..22: mol_type = other DNA
cacccacctcagcagctcaggt

SEQ ID NO: 4519 - DNA, 23 bp, Homo sapiens
  source 1..23: mol_type = other DNA
tgataaactcagcatgctccagg

SEQ ID NO: 4520 - DNA, 24 bp, Homo sapiens
  source 1..24: mol_type = other DNA
tactacaacactgaatgctgaggg

SEQ ID NO: 4521 - DNA, 23 bp, Homo sapiens
  source 1..23: mol_type = other DNA
caaacacctctgactgctcaggg

SEQ ID NO: 4522 - DNA, 23 bp, Homo sapiens
  source 1..23: mol_type = other DNA
tattcatcactacatgctgacag

SEQ ID NO: 4523 - DNA, 22 bp, Homo sapiens
  source 1..22: mol_type = other DNA
gacctccactgcatgctgatgg

SEQ ID NO: 4524 - DNA, 22 bp, Homo sapiens
  source 1..22: mol_type = other DNA
cactctactctgcagcttaagg

SEQ ID NO: 4525 - DNA, 22 bp, Homo sapiens
  source 1..22: mol_type = other DNA
aactcaccatgaatgctcttgg

SEQ ID NO: 4526 - DNA, 23 bp, Homo sapiens
  source 1..23: mol_type = other DNA
tactcacctttgcatccctccgg

SEQ ID NO: 4527 - DNA, 23 bp, Homo sapiens
  source 1..23: mol_type = other DNA
ctagcacctgtccatgctcatgg

SEQ ID NO: 4528 - DNA, 23 bp, Homo sapiens
  source 1..23: mol_type = other DNA
tattcaccactgcatgttatttg

SEQ ID NO: 4529 - DNA, 23 bp, Homo sapiens
  source 1..23: mol_type = other DNA
tactcatctctggatgaacatgg

SEQ ID NO: 4530 - DNA, 23 bp, Homo sapiens
  source 1..23: mol_type = other DNA
cactattttctccatgctcaggg

SEQ ID NO: 4531 - DNA, 23 bp, Homo sapiens
  source 1..23: mol_type = other DNA
gcctctactctgaatgctcaagt

SEQ ID NO: 4532 - DNA, 22 bp, Homo sapiens
  source 1..22: mol_type = other DNA
aagtcactatgcatgcccaagg

SEQ ID NO: 4533 - DNA, 23 bp, Homo sapiens
  source 1..23: mol_type = other DNA
cactcacctcatcttgctcacta

SEQ ID NO: 4534 - DNA, 23 bp, Homo sapiens
  source 1..23: mol_type = other DNA
cactcacctcagcctgccaaagt

SEQ ID NO: 4535 - DNA, 23 bp, Homo sapiens
  source 1..23: mol_type = other DNA
cagtcacctctgcatacccaagc

SEQ ID NO: 4536 - DNA, 22 bp, Homo sapiens
  source 1..22: mol_type = other DNA
gacttatctctgcatgtctagg

SEQ ID NO: 4537 - DNA, 22 bp, Homo sapiens
  source 1..22: mol_type = other DNA
ggctcacctctgctgtacatgg

SEQ ID NO: 4538 - DNA, 23 bp, Homo sapiens
  source 1..23: mol_type = other DNA
gactgacctctgcatgggcagca

SEQ ID NO: 4539 - DNA, 23 bp, Homo sapiens
  source 1..23: mol_type = other DNA
tactcacttcagcagcctcccgt

SEQ ID NO: 4540 - DNA, 23 bp, Homo sapiens
  source 1..23: mol_type = other DNA
aaaacacatctggatgctcatga

SEQ ID NO: 4541 - DNA, 22 bp, Homo sapiens
  source 1..22: mol_type = other DNA
taaatacttctgcatgccaggg

SEQ ID NO: 4542 - DNA, 22 bp, Homo sapiens
  source 1..22: mol_type = other DNA
tattcatctctgcatctaagga

SEQ ID NO: 4543 - DNA, 23 bp, Homo sapiens
  source 1..23: mol_type = other DNA
tactcacaggtgcatgcacatgc

SEQ ID NO: 4544 - DNA, 22 bp, Homo sapiens
  source 1..22: mol_type = other DNA
ttctcaccctgcatgatcatca

SEQ ID NO: 4545 - DNA, 23 bp, Homo sapiens
  source 1..23: mol_type = other DNA
tactcagatcttcattctcaaga

SEQ ID NO: 4546 - DNA, 23 bp, Homo sapiens
  source 1..23: mol_type = other DNA
tactgtcatctgcatgatttagg

SEQ ID NO: 4547 - DNA, 23 bp, Homo sapiens
  source 1..23: mol_type = other DNA
taaaaatctatgcatgctcaaga

SEQ ID NO: 4548 - DNA, 23 bp, Homo sapiens
  source 1..23: mol_type = other DNA
tactctctactgcattctaagga

SEQ ID NO: 4549 - DNA, 23 bp, Homo sapiens
  source 1..23: mol_type = other DNA
caatcacatgtgcatgcacaagt

SEQ ID NO: 4550 - DNA, 22 bp, Homo sapiens
  source 1..22: mol_type = other DNA
tacactactctgcctctcaagg

SEQ ID NO: 4551 - DNA, 23 bp, Homo sapiens
  source 1..23: mol_type = other DNA
tactcacctctgccttcctttgt

SEQ ID NO: 4552 - DNA, 22 bp, Homo sapiens
  source 1..22: mol_type = other DNA
ttatcaccctgcatgttcaggg

SEQ ID NO: 4553 - DNA, 23 bp, Homo sapiens
  source 1..23: mol_type = other DNA
tacatacatctgcatgctcatga

SEQ ID NO: 4554 - DNA, 22 bp, Homo sapiens
  source 1..22: mol_type = other DNA
aactcacctctgcattacatgg

SEQ ID NO: 4555 - DNA, 23 bp, Homo sapiens
  source 1..23: mol_type = other DNA
tactcagttctgcatgatcaggg

SEQ ID NO: 4556 - DNA, 23 bp, Homo sapiens
  source 1..23: mol_type = other DNA
tacccacctctgcatcccaaagt

SEQ ID NO: 4557 - DNA, 23 bp, Homo sapiens
  source 1..23: mol_type = other DNA
ctttcaccactgcatgttcttgg

SEQ ID NO: 4558 - DNA, 23 bp, Homo sapiens
  source 1..23: mol_type = other DNA
gccgtacctcagcatgctcaagg

SEQ ID NO: 4559 - DNA, 23 bp, Homo sapiens
  source 1..23: mol_type = other DNA
tgtctacctatgcatgcacatgg

SEQ ID NO: 4560 - DNA, 22 bp, Homo sapiens
  source 1..22: mol_type = other DNA
aactacatctgcatgctctaag

SEQ ID NO: 4561 - DNA, 23 bp, Homo sapiens
  source 1..23: mol_type = other DNA
tgaccacctctgcatgctcctgg

SEQ ID NO: 4562 - DNA, 24 bp, Homo sapiens
  source 1..24: mol_type = other DNA
cagtcacctctgcatggctcagag

SEQ ID NO: 4563 - DNA, 23 bp, Homo sapiens
  source 1..23: mol_type = other DNA
ttgtcacctctgcatagacaagg

SEQ ID NO: 4564 - DNA, 22 bp, Homo sapiens
  source 1..22: mol_type = other DNA
gcttcatctctcatgctcatgg

SEQ ID NO: 4565 - DNA, 24 bp, Homo sapiens
  source 1..24: mol_type = other DNA
tattaactcactgcatgctcacag

SEQ ID NO: 4566 - DNA, 22 bp, Homo sapiens
  source 1..22: mol_type = other DNA
ttcctacctctgcatgtcaaag

SEQ ID NO: 4567 - DNA, 23 bp, Homo sapiens
  source 1..23: mol_type = other DNA
tccttttatctccatgctcaggg

SEQ ID NO: 4568 - DNA, 21 bp, Homo sapiens
  source 1..21: mol_type = other DNA
cactcacctccatgcccacgg

SEQ ID NO: 4569 - DNA, 22 bp, Homo sapiens
  source 1..22: mol_type = other DNA
tgctccctacacatgctcaagg

SEQ ID NO: 4570 - DNA, 23 bp, Homo sapiens
  source 1..23: mol_type = other DNA
aattcacctctacatggttcagg

SEQ ID NO: 4571 - DNA, 22 bp, Homo sapiens
  source 1..22: mol_type = other DNA
aaaacacctctgcatgtcaggg

SEQ ID NO: 4572 - DNA, 22 bp, Homo sapiens
  source 1..22: mol_type = other DNA
gaaacacactgcatgctcatgg

SEQ ID NO: 4573 - DNA, 23 bp, Homo sapiens
  source 1..23: mol_type = other DNA
tgcatacatatacatgctcatgg

SEQ ID NO: 4574 - DNA, 23 bp, Homo sapiens
  source 1..23: mol_type = other DNA
tcctccctcatgcatgctcatag

SEQ ID NO: 4575 - DNA, 22 bp, Homo sapiens
  source 1..22: mol_type = other DNA
ttctcactctacttgctcaagg

SEQ ID NO: 4576 - DNA, 22 bp, Homo sapiens
  source 1..22: mol_type = other DNA
tcctcactctgcaggctcaggg

SEQ ID NO: 4577 - DNA, 22 bp, Homo sapiens
  source 1..22: mol_type = other DNA
tcctcacattgcacgctcaggg

SEQ ID NO: 4578 - DNA, 22 bp, Homo sapiens
  source 1..22: mol_type = other DNA
taattacctctgcatctcgggg

SEQ ID NO: 4579 - DNA, 22 bp, Homo sapiens
  source 1..22: mol_type = other DNA
cattcacctctgcatctcagcg

SEQ ID NO: 4580 - DNA, 22 bp, Homo sapiens
  source 1..22: mol_type = other DNA
aactcaccctgcataatcactg

SEQ ID NO: 4581 - DNA, 23 bp, Homo sapiens
  source 1..23: mol_type = other DNA
tagatacccctgcatgctttggg

SEQ ID NO: 4582 - DNA, 22 bp, Homo sapiens
  source 1..22: mol_type = other DNA
caaacacatctcatgctcatgg

SEQ ID NO: 4583 - DNA, 23 bp, Homo sapiens
  source 1..23: mol_type = other DNA
catcatcatctgcatgctcaagg

SEQ ID NO: 4584 - DNA, 24 bp, Homo sapiens
  source 1..24: mol_type = other DNA
cactcacctctagcctgctcacgg

SEQ ID NO: 4585 - DNA, 22 bp, Homo sapiens
  source 1..22: mol_type = other DNA
gtttcaccactgcatgccatgg

SEQ ID NO: 4586 - DNA, 23 bp, Homo sapiens
  source 1..23: mol_type = other DNA
taataccatcaccatgctcaagg

SEQ ID NO: 4587 - DNA, 22 bp, Homo sapiens
  source 1..22: mol_type = other DNA
ttctcactactgcatgtcaaag

SEQ ID NO: 4588 - DNA, 23 bp, Homo sapiens
  source 1..23: mol_type = other DNA
aactcacctctgcattcatcttg

SEQ ID NO: 4589 - DNA, 23 bp, Homo sapiens
  source 1..23: mol_type = other DNA
ttttcaccactgtatgttcatgg

SEQ ID NO: 4590 - DNA, 23 bp, Homo sapiens
  source 1..23: mol_type = other DNA
tacattcatctgcatgctcagaa

SEQ ID NO: 4591 - DNA, 23 bp, Homo sapiens
  source 1..23: mol_type = other DNA
tcctcacctctatatgctcaaca

SEQ ID NO: 4592 - DNA, 24 bp, Homo sapiens
  source 1..24: mol_type = other DNA
ctctcacctcagacatgctcagag

SEQ ID NO: 4593 - DNA, 22 bp, Homo sapiens
  source 1..22: mol_type = other DNA
aagtcaccacacatgctcaggg

SEQ ID NO: 4594 - DNA, 22 bp, Homo sapiens
  source 1..22: mol_type = other DNA
tgctacctttgcatggtcaggg

SEQ ID NO: 4595 - DNA, 22 bp, Homo sapiens
  source 1..22: mol_type = other DNA
tactcaatctgcatattcagag

SEQ ID NO: 4596 - DNA, 21 bp, Homo sapiens
  source 1..21: mol_type = other DNA
ctctcacctctgctctcaagg

SEQ ID NO: 4597 - DNA, 23 bp, Homo sapiens
  source 1..23: mol_type = other DNA
caaacccctctgcatgctcaagc

SEQ ID NO: 4598 - DNA, 23 bp, Homo sapiens
  source 1..23: mol_type = other DNA
aaagttcccctgcatgctcaggg

SEQ ID NO: 4599 - DNA, 22 bp, Homo sapiens
  source 1..22: mol_type = other DNA
gactgattctgtatgctcacgg

SEQ ID NO: 4600 - DNA, 22 bp, Homo sapiens
  source 1..22: mol_type = other DNA
tactctcctctaatgctctagg

SEQ ID NO: 4601 - DNA, 23 bp, Homo sapiens
  source 1..23: mol_type = other DNA
gcctcacccccacatgctcctgg

SEQ ID NO: 4602 - DNA, 23 bp, Homo sapiens
  source 1..23: mol_type = other DNA
tgttgatctctgcatgttcaggg

SEQ ID NO: 4603 - DNA, 23 bp, Homo sapiens
  source 1..23: mol_type = other DNA
cactcatctctgcaagctccagg

SEQ ID NO: 4604 - DNA, 23 bp, Homo sapiens
  source 1..23: mol_type = other DNA
tactccacttcacatgctcagag

SEQ ID NO: 4605 - DNA, 22 bp, Homo sapiens
  source 1..22: mol_type = other DNA
tacacatactgcatgctcaggt

SEQ ID NO: 4606 - DNA, 23 bp, Homo sapiens
  source 1..23: mol_type = other DNA
cactcaccactgtatgttcagag

SEQ ID NO: 4607 - DNA, 22 bp, Homo sapiens
  source 1..22: mol_type = other DNA
tgctcagcaggcatgctcaggg

SEQ ID NO: 4608 - DNA, 23 bp, Homo sapiens
  source 1..23: mol_type = other DNA
taaccccctctacttgctcaggg

SEQ ID NO: 4609 - DNA, 21 bp, Homo sapiens
  source 1..21: mol_type = other DNA
taatcatctgcatactcacag

SEQ ID NO: 4610 - DNA, 23 bp, Homo sapiens
  source 1..23: mol_type = other DNA
tgtgcacctctgcatgcccaggt

SEQ ID NO: 4611 - DNA, 24 bp, Homo sapiens
  source 1..24: mol_type = other DNA
cagtcacactgtgcatactcaagg

SEQ ID NO: 4612 - DNA, 22 bp, Homo sapiens
  source 1..22: mol_type = other DNA
tacacagtttgcatgctcttgg

SEQ ID NO: 4613 - DNA, 22 bp, Homo sapiens
  source 1..22: mol_type = other DNA
tactcaaactgcgtgctcttgg

SEQ ID NO: 4614 - DNA, 22 bp, Homo sapiens
  source 1..22: mol_type = other DNA
gacaaacctatcatgctcacgg

SEQ ID NO: 4615 - DNA, 22 bp, Homo sapiens
  source 1..22: mol_type = other DNA
gaataaccttccatgctcatgg

SEQ ID NO: 4616 - DNA, 22 bp, Homo sapiens
  source 1..22: mol_type = other DNA
ttttcacctctactactcaggg

SEQ ID NO: 4617 - DNA, 24 bp, Homo sapiens
  source 1..24: mol_type = other DNA
ttctcaacctcaacatgttcaagg

SEQ ID NO: 4618 - DNA, 23 bp, Homo sapiens
  source 1..23: mol_type = other DNA
tactcacctctccaagctcaatt

SEQ ID NO: 4619 - DNA, 23 bp, Homo sapiens
  source 1..23: mol_type = other DNA
ttcttccctatgcaggctcctgg

SEQ ID NO: 4620 - DNA, 23 bp, Homo sapiens
  source 1..23: mol_type = other DNA
cactccattcttcatgctcaggg

SEQ ID NO: 4621 - DNA, 23 bp, Homo sapiens
  source 1..23: mol_type = other DNA
ccctcaccactccatgttcatgc

SEQ ID NO: 4622 - DNA, 23 bp, Homo sapiens
  source 1..23: mol_type = other DNA
tactcaccccaggcagctcatgg

SEQ ID NO: 4623 - DNA, 22 bp, Homo sapiens
  source 1..22: mol_type = other DNA
tacgcaccctccctgctcaagg

SEQ ID NO: 4624 - DNA, 22 bp, Homo sapiens
  source 1..22: mol_type = other DNA
cacacagctctgctgctcaggg

SEQ ID NO: 4625 - DNA, 22 bp, Homo sapiens
  source 1..22: mol_type = other DNA
tactcacccttacatctcctgg

SEQ ID NO: 4626 - DNA, 22 bp, Homo sapiens
  source 1..22: mol_type = other DNA
agctcacctctgcttctcttgg

SEQ ID NO: 4627 - DNA, 23 bp, Homo sapiens
  source 1..23: mol_type = other DNA
taagcacctccacatgttcatga

SEQ ID NO: 4628 - DNA, 23 bp, Homo sapiens
  source 1..23: mol_type = other DNA
tgttcacctctgcagtctcatag

SEQ ID NO: 4629 - DNA, 23 bp, Homo sapiens
  source 1..23: mol_type = other DNA
tgctcaccagtccatgctcatgg

SEQ ID NO: 4630 - DNA, 24 bp, Homo sapiens
  source 1..24: mol_type = other DNA
cactcacaatctgcatgcagaggg

SEQ ID NO: 4631 - DNA, 23 bp, Homo sapiens
  source 1..23: mol_type = other DNA
tactcatctctgtctggtcaggg

SEQ ID NO: 4632 - DNA, 23 bp, Homo sapiens
  source 1..23: mol_type = other DNA
tgcagaactcctcatgctcaggg

SEQ ID NO: 4633 - DNA, 22 bp, Homo sapiens
  source 1..22: mol_type = other DNA
ttctacctgtggatgttcaggg

SEQ ID NO: 4634 - DNA, 22 bp, Homo sapiens
  source 1..22: mol_type = other DNA
aacttcctctgcatgcccaggc

SEQ ID NO: 4635 - DNA, 22 bp, Homo sapiens
  source 1..22: mol_type = other DNA
tactcactctacaagctcaaat

SEQ ID NO: 4636 - DNA, 22 bp, Homo sapiens
  source 1..22: mol_type = other DNA
tattaacctctgatgcttatga

SEQ ID NO: 4637 - DNA, 23 bp, Homo sapiens
  source 1..23: mol_type = other DNA
tacaaaaccctgcatgcttatgt

SEQ ID NO: 4638 - DNA, 23 bp, Homo sapiens
  source 1..23: mol_type = other DNA
ttctcacctcctgctgctcacag

SEQ ID NO: 4639 - DNA, 23 bp, Homo sapiens
  source 1..23: mol_type = other DNA
ctctcacctctgcagcaccatgg

SEQ ID NO: 4640 - DNA, 23 bp, Homo sapiens
  source 1..23: mol_type = other DNA
tactcacctcagtatctcctggg

SEQ ID NO: 4641 - DNA, 23 bp, Homo sapiens
  source 1..23: mol_type = other DNA
tacaaaccaatgcatgctcattg

SEQ ID NO: 4642 - DNA, 23 bp, Homo sapiens
  source 1..23: mol_type = other DNA
aatgcaccgctgcctgcccaggg

SEQ ID NO: 4643 - DNA, 23 bp, Homo sapiens
  source 1..23: mol_type = other DNA
tattccactctacatgtccatgg

SEQ ID NO: 4644 - DNA, 23 bp, Homo sapiens
  source 1..23: mol_type = other DNA
ttttcacctctgcatattccagt

SEQ ID NO: 4645 - DNA, 22 bp, Homo sapiens
  source 1..22: mol_type = other DNA
tgctcactctgcagggtcaggg

SEQ ID NO: 4646 - DNA, 22 bp, Homo sapiens
  source 1..22: mol_type = other DNA
tactcattttgcatgttcgagg

SEQ ID NO: 4647 - DNA, 22 bp, Homo sapiens
  source 1..22: mol_type = other DNA
tactcaccctgctagctgaaga

SEQ ID NO: 4648 - DNA, 23 bp, Homo sapiens
  source 1..23: mol_type = other DNA
tatttccatatgcatgcacatgg

SEQ ID NO: 4649 - DNA, 23 bp, Homo sapiens
  source 1..23: mol_type = other DNA
cactcacctcggcctccccaagg

SEQ ID NO: 4650 - DNA, 22 bp, Homo sapiens
  source 1..22: mol_type = other DNA
ttcttactctgcatgcctacgg

SEQ ID NO: 4651 - DNA, 22 bp, Homo sapiens
  source 1..22: mol_type = other DNA
taatcacctcccatggtctggg

SEQ ID NO: 4652 - DNA, 22 bp, Homo sapiens
  source 1..22: mol_type = other DNA
tactcacctctgtatcccaggt

SEQ ID NO: 4653 - DNA, 22 bp, Homo sapiens
  source 1..22: mol_type = other DNA
tacccacctcagcatcccagag

SEQ ID NO: 4654 - DNA, 22 bp, Homo sapiens
  source 1..22: mol_type = other DNA
tactcatctctccatctcttgg

SEQ ID NO: 4655 - DNA, 23 bp, Homo sapiens
  source 1..23: mol_type = other DNA
tcctcacgtcaggatcctcacag

SEQ ID NO: 4656 - DNA, 23 bp, Homo sapiens
  source 1..23: mol_type = other DNA
tagtcaaacctgcatgttcctgg

SEQ ID NO: 4657 - DNA, 23 bp, Homo sapiens
  source 1..23: mol_type = other DNA
tacatatttctgtatgttcacgg

SEQ ID NO: 4658 - DNA, 23 bp, Homo sapiens
  source 1..23: mol_type = other DNA
aactcatctcctcatacccaggg

SEQ ID NO: 4659 - DNA, 25 bp, Homo sapiens
  source 1..25: mol_type = other DNA
tactagcacctctgcaaggttagtg

SEQ ID NO: 4660 - DNA, 22 bp, Homo sapiens
  source 1..22: mol_type = other DNA
tgcccacctctgcctcccaagg

SEQ ID NO: 4661 - DNA, 23 bp, Homo sapiens
  source 1..23: mol_type = other DNA
aactcacctctgagtgcaaaggc

SEQ ID NO: 4662 - DNA, 23 bp, Homo sapiens
  source 1..23: mol_type = other DNA
tacttatctgtccattgtcaagg

SEQ ID NO: 4663 - DNA, 23 bp, Homo sapiens
  source 1..23: mol_type = other DNA
aactctcctcttcatgcccaccc

SEQ ID NO: 4664 - DNA, 22 bp, Homo sapiens
  source 1..22: mol_type = other DNA
tactgacctctgatgctgcatg

SEQ ID NO: 4665 - DNA, 21 bp, Homo sapiens
  source 1..21: mol_type = other DNA
tactcatctgaatactcaagc

SEQ ID NO: 4666 - DNA, 23 bp, Homo sapiens
  source 1..23: mol_type = other DNA
tactacaccatgcatggtcatgg

SEQ ID NO: 4667 - DNA, 23 bp, Homo sapiens
  source 1..23: mol_type = other DNA
gcctcacctctgcatgctccgtg

SEQ ID NO: 4668 - DNA, 22 bp, Homo sapiens
  source 1..22: mol_type = other DNA
gactcacctctgcttctcacgg

SEQ ID NO: 4669 - DNA, 23 bp, Homo sapiens
  source 1..23: mol_type = other DNA
cactacactctacatgctcctgg

SEQ ID NO: 4670 - DNA, 22 bp, Homo sapiens
  source 1..22: mol_type = other DNA
atatcacctctgctactcatgg

SEQ ID NO: 4671 - DNA, 23 bp, Homo sapiens
  source 1..23: mol_type = other DNA
actgcacctctgcacgctcagag

SEQ ID NO: 4672 - DNA, 23 bp, Homo sapiens
  source 1..23: mol_type = other DNA
ccagcacctctgcatgcttacgg

SEQ ID NO: 4673 - DNA, 22 bp, Homo sapiens
  source 1..22: mol_type = other DNA
aactcattctgcatactcagtg

SEQ ID NO: 4674 - DNA, 22 bp, Homo sapiens
  source 1..22: mol_type = other DNA
tgcacactctgcatgctcaggc

SEQ ID NO: 4675 - DNA, 23 bp, Homo sapiens
  source 1..23: mol_type = other DNA
tattcaccactgtatactcatga

SEQ ID NO: 4676 - DNA, 23 bp, Homo sapiens
  source 1..23: mol_type = other DNA
tttccacctctgcattctcatgg

SEQ ID NO: 4677 - DNA, 22 bp, Homo sapiens
  source 1..22: mol_type = other DNA
aacccacctctgttgctcatgg

SEQ ID NO: 4678 - DNA, 23 bp, Homo sapiens
  source 1..23: mol_type = other DNA
cactcacacttgcatgctccagg

SEQ ID NO: 4679 - DNA, 23 bp, Homo sapiens
  source 1..23: mol_type = other DNA
tgtacacatatgcatgctcaagg

SEQ ID NO: 4680 - DNA, 23 bp, Homo sapiens
  source 1..23: mol_type = other DNA
tcttcacctctgcatgccacagg

SEQ ID NO: 4681 - DNA, 22 bp, Homo sapiens
  source 1..22: mol_type = other DNA
tccactctcagcatgctcaggg

SEQ ID NO: 4682 - DNA, 22 bp, Homo sapiens
  source 1..22: mol_type = other DNA
cactcgactctgctgctcatgg

SEQ ID NO: 4683 - DNA, 21 bp, Homo sapiens
  source 1..21: mol_type = other DNA
tttttacctccatgctcaagg

SEQ ID NO: 4684 - DNA, 22 bp, Homo sapiens
  source 1..22: mol_type = other DNA
tactcacctctgctgctaagga

SEQ ID NO: 4685 - DNA, 23 bp, Homo sapiens
  source 1..23: mol_type = other DNA
tgtatgcctctgcatgctcatag

SEQ ID NO: 4686 - DNA, 22 bp, Homo sapiens
  source 1..22: mol_type = other DNA
tacttaccctgcatgatcatga

SEQ ID NO: 4687 - DNA, 23 bp, Homo sapiens
  source 1..23: mol_type = other DNA
ctgccacctctgcatgcacacag

SEQ ID NO: 4688 - DNA, 22 bp, Homo sapiens
  source 1..22: mol_type = other DNA
aagtcaccatgcatgctcaggg

SEQ ID NO: 4689 - DNA, 22 bp, Homo sapiens
  source 1..22: mol_type = other DNA
gactcacccctgcatctctggt

SEQ ID NO: 4690 - DNA, 22 bp, Homo sapiens
  source 1..22: mol_type = other DNA
tgctcatctctgctgctcacag

SEQ ID NO: 4691 - DNA, 23 bp, Homo sapiens
  source 1..23: mol_type = other DNA
ctctcacctctggatgcatacgg

SEQ ID NO: 4692 - DNA, 22 bp, Homo sapiens
  source 1..22: mol_type = other DNA
tactcatcctacatcctcagag

SEQ ID NO: 4693 - DNA, 22 bp, Homo sapiens
  source 1..22: mol_type = other DNA
tgcacacctctgctgcacaggg

SEQ ID NO: 4694 - DNA, 22 bp, Homo sapiens
  source 1..22: mol_type = other DNA
tactcacctaacatcctcaaga

SEQ ID NO: 4695 - DNA, 22 bp, Homo sapiens
  source 1..22: mol_type = other DNA
tactccctctgcagcttcaggg

SEQ ID NO: 4696 - DNA, 22 bp, Homo sapiens
  source 1..22: mol_type = other DNA
ttcccacctcccatgctctggg

SEQ ID NO: 4697 - DNA, 23 bp, Homo sapiens
  source 1..23: mol_type = other DNA
ttatcaccactccatgctcttgg

SEQ ID NO: 4698 - DNA, 22 bp, Homo sapiens
  source 1..22: mol_type = other DNA
tactccagcagcatgctctggg

SEQ ID NO: 4699 - DNA, 22 bp, Homo sapiens
  source 1..22: mol_type = other DNA
aaatccatctgcatgctcagtg

SEQ ID NO: 4700 - DNA, 23 bp, Homo sapiens
  source 1..23: mol_type = other DNA
tactcagtcctgcatgccctggg

SEQ ID NO: 4701 - DNA, 21 bp, Homo sapiens
  source 1..21: mol_type = other DNA
ttctcaactgcatactcaagg

SEQ ID NO: 4702 - DNA, 23 bp, Homo sapiens
  source 1..23: mol_type = other DNA
aggtcacctctgcattctcttgg

SEQ ID NO: 4703 - DNA, 23 bp, Homo sapiens
  source 1..23: mol_type = other DNA
ttatctactctgcaaactcaagg

SEQ ID NO: 4704 - DNA, 24 bp, Homo sapiens
  source 1..24: mol_type = other DNA
aactcacctcaacatgtcccaagg

SEQ ID NO: 4705 - DNA, 22 bp, Homo sapiens
  source 1..22: mol_type = other DNA
tgctcaccactgcatctcatgc

SEQ ID NO: 4706 - DNA, 23 bp, Homo sapiens
  source 1..23: mol_type = other DNA
accttacctctgcatcatcaaag

SEQ ID NO: 4707 - DNA, 22 bp, Homo sapiens
  source 1..22: mol_type = other DNA
gactcactaagcatgatcaagg

SEQ ID NO: 4708 - DNA, 23 bp, Homo sapiens
  source 1..23: mol_type = other DNA
tgagcccctctacatgctcaaag

SEQ ID NO: 4709 - DNA, 21 bp, Homo sapiens
  source 1..21: mol_type = other DNA
tagtcccctgcatgctcttgg

SEQ ID NO: 4710 - DNA, 21 bp, Homo sapiens
  source 1..21: mol_type = other DNA
tagaactctgcatgctccagg

SEQ ID NO: 4711 - DNA, 22 bp, Homo sapiens
  source 1..22: mol_type = other DNA
cactctctctgcatgctatagg

SEQ ID NO: 4712 - DNA, 22 bp, Homo sapiens
  source 1..22: mol_type = other DNA
tatggagctctgcatctcatgg

SEQ ID NO: 4713 - DNA, 22 bp, Homo sapiens
  source 1..22: mol_type = other DNA
tgctgactctgcatgctcgtga

SEQ ID NO: 4714 - DNA, 22 bp, Homo sapiens
  source 1..22: mol_type = other DNA
ctctcagctctgatgctcaggg

SEQ ID NO: 4715 - DNA, 22 bp, Homo sapiens
  source 1..22: mol_type = other DNA
gaagcacattgcatgctcaggg

SEQ ID NO: 4716 - DNA, 23 bp, Homo sapiens
  source 1..23: mol_type = other DNA
gacaaacctccacatgcccaagg

SEQ ID NO: 4717 - DNA, 22 bp, Homo sapiens
  source 1..22: mol_type = other DNA
aaatagccttgcatgctcaggg

SEQ ID NO: 4718 - DNA, 22 bp, Homo sapiens
  source 1..22: mol_type = other DNA
cactccctctggatgctctagg

SEQ ID NO: 4719 - DNA, 22 bp, Homo sapiens
  source 1..22: mol_type = other DNA
ctctcatccctgcagctcacgg

SEQ ID NO: 4720 - DNA, 22 bp, Homo sapiens
  source 1..22: mol_type = other DNA
ttctcacctctgcaggtcagag

SEQ ID NO: 4721 - DNA, 22 bp, Homo sapiens
  source 1..22: mol_type = other DNA
tgcacactcagcatgctcagtg

SEQ ID NO: 4722 - DNA, 22 bp, Homo sapiens
  source 1..22: mol_type = other DNA
tacccaatctgcatgcacttgg

SEQ ID NO: 4723 - DNA, 22 bp, Homo sapiens
  source 1..22: mol_type = other DNA
tatgacctttgtatgctcagtg

SEQ ID NO: 4724 - DNA, 23 bp, Homo sapiens
  source 1..23: mol_type = other DNA
tacacacatatgcatgctcagtt

SEQ ID NO: 4725 - DNA, 22 bp, Homo sapiens
  source 1..22: mol_type = other DNA
tagtacatctgcatgttctggg

SEQ ID NO: 4726 - DNA, 21 bp, Homo sapiens
  source 1..21: mol_type = other DNA
tactacactgcttgctcaagg

SEQ ID NO: 4727 - DNA, 22 bp, Homo sapiens
  source 1..22: mol_type = other DNA
tacaacctctgtatacccaggg

SEQ ID NO: 4728 - DNA, 22 bp, Homo sapiens
  source 1..22: mol_type = other DNA
aactcccctctgatgccctggg

SEQ ID NO: 4729 - DNA, 22 bp, Homo sapiens
  source 1..22: mol_type = other DNA
gcctcacctctggtgctcaggc

SEQ ID NO: 4730 - DNA, 23 bp, Homo sapiens
  source 1..23: mol_type = other DNA
tactaacctaaacatactcttgg

SEQ ID NO: 4731 - DNA, 23 bp, Homo sapiens
  source 1..23: mol_type = other DNA
tgaccaccactccaagctcaggg

SEQ ID NO: 4732 - DNA, 22 bp, Homo sapiens
  source 1..22: mol_type = other DNA
ttttcacctctacagctctggg

SEQ ID NO: 4733 - DNA, 21 bp, Homo sapiens
  source 1..21: mol_type = other DNA
taatcccctccttgctcaggg

SEQ ID NO: 4734 - DNA, 23 bp, Homo sapiens
  source 1..23: mol_type = other DNA
aacacacatatgcacgcacaagg

SEQ ID NO: 4735 - DNA, 23 bp, Homo sapiens
  source 1..23: mol_type = other DNA
tattcacccctgcatcaccagga

SEQ ID NO: 4736 - DNA, 23 bp, Homo sapiens
  source 1..23: mol_type = other DNA
tactcagacctgccagctctcgg

SEQ ID NO: 4737 - DNA, 22 bp, Homo sapiens
  source 1..22: mol_type = other DNA
tactccctctgcatgttcctta

SEQ ID NO: 4738 - DNA, 22 bp, Homo sapiens
  source 1..22: mol_type = other DNA
tactcaactctgctgttccagg

SEQ ID NO: 4739 - DNA, 21 bp, Homo sapiens
  source 1..21: mol_type = other DNA
tacttctttgcatgctcatga

SEQ ID NO: 4740 - DNA, 22 bp, Homo sapiens
  source 1..22: mol_type = other DNA
cattcacctctgcagctcaatg

SEQ ID NO: 4741 - DNA, 23 bp, Homo sapiens
  source 1..23: mol_type = other DNA
agctcagcgctacttgctcaggg

SEQ ID NO: 4742 - DNA, 23 bp, Homo sapiens
  source 1..23: mol_type = other DNA
aactcacctgtgcatgcgcatac

SEQ ID NO: 4743 - DNA, 23 bp, Homo sapiens
  source 1..23: mol_type = other DNA
tactcaactgcacatgctcatct

SEQ ID NO: 4744 - DNA, 22 bp, Homo sapiens
  source 1..22: mol_type = other DNA
tactcaacctgtatgttcacag

SEQ ID NO: 4745 - DNA, 23 bp, Homo sapiens
  source 1..23: mol_type = other DNA
aagtcacttcttcaagctcagga

SEQ ID NO: 4746 - DNA, 23 bp, Homo sapiens
  source 1..23: mol_type = other DNA
aagagacatctgcatgctcatgt

SEQ ID NO: 4747 - DNA, 23 bp, Homo sapiens
  source 1..23: mol_type = other DNA
catgcaactctccatgctcagga

SEQ ID NO: 4748 - DNA, 23 bp, Homo sapiens
  source 1..23: mol_type = other DNA
ttaccacctatgtttgctcaagg

SEQ ID NO: 4749 - DNA, 22 bp, Homo sapiens
  source 1..22: mol_type = other DNA
cactcaccgctgcagtccatgg

SEQ ID NO: 4750 - DNA, 22 bp, Homo sapiens
  source 1..22: mol_type = other DNA
tcctacctctgcatgcctgtgg

SEQ ID NO: 4751 - DNA, 22 bp, Homo sapiens
  source 1..22: mol_type = other DNA
ttatacctctgcattctcatag

SEQ ID NO: 4752 - DNA, 23 bp, Homo sapiens
  source 1..23: mol_type = other DNA
tatttggctctccaagctcaagg

SEQ ID NO: 4753 - DNA, 24 bp, Homo sapiens
  source 1..24: mol_type = other DNA
cactcacctttacatgggtcaagg

SEQ ID NO: 4754 - DNA, 22 bp, Homo sapiens
  source 1..22: mol_type = other DNA
cactcacatctgatgctcaatg

SEQ ID NO: 4755 - DNA, 23 bp, Homo sapiens
  source 1..23: mol_type = other DNA
cactcacccatgcaagctcctag

SEQ ID NO: 4756 - DNA, 23 bp, Homo sapiens
  source 1..23: mol_type = other DNA
tacatacgtatgcatgttcatgt

SEQ ID NO: 4757 - DNA, 23 bp, Homo sapiens
  source 1..23: mol_type = other DNA
tactcatctttgtatgctcaggc

SEQ ID NO: 4758 - DNA, 21 bp, Homo sapiens
  source 1..21: mol_type = other DNA
tactcacctctccagccacgg

SEQ ID NO: 4759 - DNA, 22 bp, Homo sapiens
  source 1..22: mol_type = other DNA
tactcagctctgctgctgtggt

SEQ ID NO: 4760 - DNA, 22 bp, Homo sapiens
  source 1..22: mol_type = other DNA
tactgacctttccatctcactg

SEQ ID NO: 4761 - DNA, 22 bp, Homo sapiens
  source 1..22: mol_type = other DNA
tactcactcagcatgttcagag

SEQ ID NO: 4762 - DNA, 22 bp, Homo sapiens
  source 1..22: mol_type = other DNA
tactcaccctgcctgctcagag

SEQ ID NO: 4763 - DNA, 23 bp, Homo sapiens
  source 1..23: mol_type = other DNA
tactcacctctgcatgtatatga

SEQ ID NO: 4764 - DNA, 23 bp, Homo sapiens
  source 1..23: mol_type = other DNA
tactcccctctgcatctcaaagg

SEQ ID NO: 4765 - DNA, 22 bp, Homo sapiens
  source 1..22: mol_type = other DNA
tactctccctacatgcacatgg

SEQ ID NO: 4766 - DNA, 21 bp, Homo sapiens
  source 1..21: mol_type = other DNA
tcctcaccagcatgctcaagg

SEQ ID NO: 4767 - DNA, 23 bp, Homo sapiens
  source 1..23: mol_type = other DNA
tgctcacctctgcagcccatggg

SEQ ID NO: 4768 - DNA, 23 bp, Homo sapiens
  source 1..23: mol_type = other DNA
tcctcaccactgcatgttcagag

SEQ ID NO: 4769 - DNA, 22 bp, Homo sapiens
  source 1..22: mol_type = other DNA
cactcacctcagcatctcagga

SEQ ID NO: 4770 - DNA, 22 bp, Homo sapiens
  source 1..22: mol_type = other DNA
tgctacctctacatgctaatgg

SEQ ID NO: 4771 - DNA, 23 bp, Homo sapiens
  source 1..23: mol_type = other DNA
tattcatctatgcatgctctggg

SEQ ID NO: 4772 - DNA, 23 bp, Homo sapiens
  source 1..23: mol_type = other DNA
tgttcctatctgcatgctccagg

SEQ ID NO: 4773 - DNA, 22 bp, Homo sapiens
  source 1..22: mol_type = other DNA
tctccacctcccatgctcaagg

SEQ ID NO: 4774 - DNA, 23 bp, Homo sapiens
  source 1..23: mol_type = other DNA
taaccaccactgcatgcacctgg

SEQ ID NO: 4775 - DNA, 23 bp, Homo sapiens
  source 1..23: mol_type = other DNA
tactcagtcctacatgctcaatg

SEQ ID NO: 4776 - DNA, 22 bp, Homo sapiens
  source 1..22: mol_type = other DNA
tactcacactgcaagctctcag

SEQ ID NO: 4777 - DNA, 22 bp, Homo sapiens
  source 1..22: mol_type = other DNA
ctgtcacctagcatgctcaggg

SEQ ID NO: 4778 - DNA, 22 bp, Homo sapiens
  source 1..22: mol_type = other DNA
ccctcaccctgcatgctccctg

SEQ ID NO: 4779 - DNA, 22 bp, Homo sapiens
  source 1..22: mol_type = other DNA
gccttaccctgcatgcttaggg

SEQ ID NO: 4780 - DNA, 23 bp, Homo sapiens
  source 1..23: mol_type = other DNA
tcctaacctctgcatgcccatgg

SEQ ID NO: 4781 - DNA, 23 bp, Homo sapiens
  source 1..23: mol_type = other DNA
ggctgtcttatgcatgctcatgg

SEQ ID NO: 4782 - DNA, 22 bp, Homo sapiens
  source 1..22: mol_type = other DNA
tgagcaccttgcatgctcttgg

SEQ ID NO: 4783 - DNA, 22 bp, Homo sapiens
  source 1..22: mol_type = other DNA
tgctcacgctgcatgctcttgg

SEQ ID NO: 4784 - DNA, 21 bp, Homo sapiens
  source 1..21: mol_type = other DNA
taccaatatgcatgctcaggg

SEQ ID NO: 4785 - DNA, 23 bp, Homo sapiens
  source 1..23: mol_type = other DNA
tgcttacctctatatgctcagag

SEQ ID NO: 4786 - DNA, 22 bp, Homo sapiens
  source 1..22: mol_type = other DNA
ttctcatcctgcatactcatgg

SEQ ID NO: 4787 - DNA, 23 bp, Homo sapiens
  source 1..23: mol_type = other DNA
tatccatctctgcatgctcaagg

SEQ ID NO: 4788 - DNA, 23 bp, Homo sapiens
  source 1..23: mol_type = other DNA
gcctaacatatgcatgctcacag

SEQ ID NO: 4789 - DNA, 23 bp, Homo sapiens
  source 1..23: mol_type = other DNA
ctcttacctctgcatcctcacag

SEQ ID NO: 4790 - DNA, 23 bp, Homo sapiens
  source 1..23: mol_type = other DNA
tgtatacctcttcttgctcatgg

SEQ ID NO: 4791 - DNA, 24 bp, Homo sapiens
  source 1..24: mol_type = other DNA
aactctacctctggatgcacaggg

SEQ ID NO: 4792 - DNA, 22 bp, Homo sapiens
  source 1..22: mol_type = other DNA
gtatcacctctgatgctcaagc

SEQ ID NO: 4793 - DNA, 23 bp, Homo sapiens
  source 1..23: mol_type = other DNA
tacatgcctctgcatgcacacag

SEQ ID NO: 4794 - DNA, 23 bp, Homo sapiens
  source 1..23: mol_type = other DNA
tgttcacagctgcatgctcatgg

SEQ ID NO: 4795 - DNA, 23 bp, Homo sapiens
  source 1..23: mol_type = other DNA
ctcctaccttggcatgctcatgg

SEQ ID NO: 4796 - DNA, 22 bp, Homo sapiens
  source 1..22: mol_type = other DNA
cactcaccttgtatgttcttgg

SEQ ID NO: 4797 - DNA, 23 bp, Homo sapiens
  source 1..23: mol_type = other DNA
gttccacctcagcatgctcacag

SEQ ID NO: 4798 - DNA, 22 bp, Homo sapiens
  source 1..22: mol_type = other DNA
gacacacattgcatgctcatgg

SEQ ID NO: 4799 - DNA, 22 bp, Homo sapiens
  source 1..22: mol_type = other DNA
acctcactcagcatgctcagga

SEQ ID NO: 4800 - DNA, 23 bp, Homo sapiens
  source 1..23: mol_type = other DNA
aactcacctctgctcgctcctgg

SEQ ID NO: 4801 - DNA, 23 bp, Homo sapiens
  source 1..23: mol_type = other DNA
aacacacatatgcatgctcacaa

SEQ ID NO: 4802 - DNA, 23 bp, Homo sapiens
  source 1..23: mol_type = other DNA
cataaaattctgcatgctcaggg

SEQ ID NO: 4803 - DNA, 22 bp, Homo sapiens
  source 1..22: mol_type = other DNA
ttctatctaggcatgctcaggg

SEQ ID NO: 4804 - DNA, 23 bp, Homo sapiens
  source 1..23: mol_type = other DNA
ttttcacatctgcatctccatgg

SEQ ID NO: 4805 - DNA, 22 bp, Homo sapiens
  source 1..22: mol_type = other DNA
tactacctctgcattctcttgg

SEQ ID NO: 4806 - DNA, 23 bp, Homo sapiens
  source 1..23: mol_type = other DNA
ttctcaccactgcatctccagag

SEQ ID NO: 4807 - DNA, 23 bp, Homo sapiens
  source 1..23: mol_type = other DNA
tgagcacctctgcatctttaagg

SEQ ID NO: 4808 - DNA, 23 bp, Homo sapiens
  source 1..23: mol_type = other DNA
tactcatctctgtattcccaggg

SEQ ID NO: 4809 - DNA, 22 bp, Homo sapiens
  source 1..22: mol_type = other DNA
tactcattcagcaagctcttgg

SEQ ID NO: 4810 - DNA, 23 bp, Homo sapiens
  source 1..23: mol_type = other DNA
ctccagcctctgcatgctcagag

SEQ ID NO: 4811 - DNA, 23 bp, Homo sapiens
  source 1..23: mol_type = other DNA
ctttcaccgctgcatactcaggg

SEQ ID NO: 4812 - DNA, 24 bp, Homo sapiens
  source 1..24: mol_type = other DNA
cactctccctctgcatgccctggg

SEQ ID NO: 4813 - DNA, 23 bp, Homo sapiens
  source 1..23: mol_type = other DNA
taccaatgtctacatgctcttgg

SEQ ID NO: 4814 - DNA, 23 bp, Homo sapiens
  source 1..23: mol_type = other DNA
tacccttccttgcatgctcttgg

SEQ ID NO: 4815 - DNA, 22 bp, Homo sapiens
  source 1..22: mol_type = other DNA
tataccctcctcatgctcaggg

SEQ ID NO: 4816 - DNA, 23 bp, Homo sapiens
  source 1..23: mol_type = other DNA
gtctattctcagcatgctcaggg

SEQ ID NO: 4817 - DNA, 23 bp, Homo sapiens
  source 1..23: mol_type = other DNA
cagggacctctgcatgatcaggg

SEQ ID NO: 4818 - DNA, 22 bp, Homo sapiens
  source 1..22: mol_type = other DNA
tgctaactctgcatgcacacag

SEQ ID NO: 4819 - DNA, 23 bp, Homo sapiens
  source 1..23: mol_type = other DNA
cctgcatctctgcttgctcaggg

SEQ ID NO: 4820 - DNA, 23 bp, Homo sapiens
  source 1..23: mol_type = other DNA
ctgtcaccactccatgctccagg

SEQ ID NO: 4821 - DNA, 24 bp, Homo sapiens
  source 1..24: mol_type = other DNA
aactaaccccctccatgctcaggg

SEQ ID NO: 4822 - DNA, 22 bp, Homo sapiens
  source 1..22: mol_type = other DNA
gacacacatcccatgctcatgg

SEQ ID NO: 4823 - DNA, 21 bp, Homo sapiens
  source 1..21: mol_type = other DNA
aactcacatgcatgctcacag

SEQ ID NO: 4824 - DNA, 23 bp, Homo sapiens
  source 1..23: mol_type = other DNA
tctctacctctgcatggtcactg

SEQ ID NO: 4825 - DNA, 23 bp, Homo sapiens
  source 1..23: mol_type = other DNA
tacaaaccactgactgctcaagg

SEQ ID NO: 4826 - DNA, 23 bp, Homo sapiens
  source 1..23: mol_type = other DNA
tcttctcaactgcatgcacatgg

SEQ ID NO: 4827 - DNA, 23 bp, Homo sapiens
  source 1..23: mol_type = other DNA
aacacaccactgcatgcacacaa

SEQ ID NO: 4828 - DNA, 23 bp, Homo sapiens
  source 1..23: mol_type = other DNA
tgcacgcctgtgcatgcacacag

SEQ ID NO: 4829 - DNA, 22 bp, Homo sapiens
  source 1..22: mol_type = other DNA
ttccacctccgcatgctcccag

SEQ ID NO: 4830 - DNA, 22 bp, Homo sapiens
  source 1..22: mol_type = other DNA
tactctctctgcatgccatggg

SEQ ID NO: 4831 - DNA, 22 bp, Homo sapiens
  source 1..22: mol_type = other DNA
taatcacattgcatactcaaga

SEQ ID NO: 4832 - DNA, 22 bp, Homo sapiens
  source 1..22: mol_type = other DNA
gccgcacctctgcatctcctgg

SEQ ID NO: 4833 - DNA, 23 bp, Homo sapiens
  source 1..23: mol_type = other DNA
gagccacctctgcatgatcctgg

SEQ ID NO: 4834 - DNA, 23 bp, Homo sapiens
  source 1..23: mol_type = other DNA
cacttacctctctaggctcattg

SEQ ID NO: 4835 - DNA, 23 bp, Homo sapiens
  source 1..23: mol_type = other DNA
gactcgcctctgctctctctggg

SEQ ID NO: 4836 - DNA, 23 bp, Homo sapiens
  source 1..23: mol_type = other DNA
tcctcatatctgcctgctccagc

SEQ ID NO: 4837 - DNA, 22 bp, Homo sapiens
  source 1..22: mol_type = other DNA
tgcttacatcagcatctcaagg

SEQ ID NO: 4838 - DNA, 23 bp, Homo sapiens
  source 1..23: mol_type = other DNA
taagaactactgcatgttcaagg

SEQ ID NO: 4839 - DNA, 23 bp, Homo sapiens
  source 1..23: mol_type = other DNA
tgctgatcactgcatgttcatgg

SEQ ID NO: 4840 - DNA, 23 bp, Homo sapiens
  source 1..23: mol_type = other DNA
tccacacctcttcatgctaaaaa

SEQ ID NO: 4841 - DNA, 23 bp, Homo sapiens
  source 1..23: mol_type = other DNA
cacacacacatgcatgcacaagg

SEQ ID NO: 4842 - DNA, 22 bp, Homo sapiens
  source 1..22: mol_type = other DNA
aactcagctctgcacctcaggg

SEQ ID NO: 4843 - DNA, 23 bp, Homo sapiens
  source 1..23: mol_type = other DNA
cactcaccccaacacgctcaggg

SEQ ID NO: 4844 - DNA, 22 bp, Homo sapiens
  source 1..22: mol_type = other DNA
tactagatctgcatgttcacag

SEQ ID NO: 4845 - DNA, 22 bp, Homo sapiens
  source 1..22: mol_type = other DNA
aacccacctctactgatcatgg

SEQ ID NO: 4846 - DNA, 22 bp, Homo sapiens
  source 1..22: mol_type = other DNA
tactcctccctgatgctctcgg

SEQ ID NO: 4847 - DNA, 23 bp, Homo sapiens
  source 1..23: mol_type = other DNA
tcctcacctcttcatgccactgg

SEQ ID NO: 4848 - DNA, 23 bp, Homo sapiens
  source 1..23: mol_type = other DNA
aacacatctccacatgcacatgg

SEQ ID NO: 4849 - DNA, 23 bp, Homo sapiens
  source 1..23: mol_type = other DNA
ttttcccatatgcatgctcacag

SEQ ID NO: 4850 - DNA, 23 bp, Homo sapiens
  source 1..23: mol_type = other DNA
cacacacctgtgagtgctcaaag

SEQ ID NO: 4851 - DNA, 23 bp, Homo sapiens
  source 1..23: mol_type = other DNA
tactcacctcggcgtcccaaagt

SEQ ID NO: 4852 - DNA, 22 bp, Homo sapiens
  source 1..22: mol_type = other DNA
tatgacctctacattctcttgg

SEQ ID NO: 4853 - DNA, 22 bp, Homo sapiens
  source 1..22: mol_type = other DNA
tactccactctgctgttctagg

SEQ ID NO: 4854 - DNA, 22 bp, Homo sapiens
  source 1..22: mol_type = other DNA
gaattacctctgcctctcatgg

SEQ ID NO: 4855 - DNA, 23 bp, Homo sapiens
  source 1..23: mol_type = other DNA
tattcacccctgcatctgcagtg

SEQ ID NO: 4856 - DNA, 23 bp, Homo sapiens
  source 1..23: mol_type = other DNA
tattcacctctgtatcctcaaca

SEQ ID NO: 4857 - DNA, 23 bp, Homo sapiens
  source 1..23: mol_type = other DNA
tccccacctctgctgcctccagg

SEQ ID NO: 4858 - DNA, 23 bp, Homo sapiens
  source 1..23: mol_type = other DNA
tacccagcactccatcctcacag

SEQ ID NO: 4859 - DNA, 23 bp, Homo sapiens
  source 1..23: mol_type = other DNA
tattcccctctgaatccttaggc

SEQ ID NO: 4860 - DNA, 23 bp, Homo sapiens
  source 1..23: mol_type = other DNA
gactcacctctgcatccttcata

SEQ ID NO: 4861 - DNA, 23 bp, Homo sapiens
  source 1..23: mol_type = other DNA
tacttacctctgcatgctcaggg

SEQ ID NO: 4862 - DNA, 22 bp, Homo sapiens
  source 1..22: mol_type = other DNA
tacacacccagcatgcccaagg

SEQ ID NO: 4863 - DNA, 22 bp, Homo sapiens
  source 1..22: mol_type = other DNA
tatctacctctgcatcttatgg

SEQ ID NO: 4864 - DNA, 22 bp, Homo sapiens
  source 1..22: mol_type = other DNA
ccctcaccctgcatgatcacgg

SEQ ID NO: 4865 - DNA, 23 bp, Homo sapiens
  source 1..23: mol_type = other DNA
gtgctacctctgcatgctcaagc

SEQ ID NO: 4866 - DNA, 22 bp, Homo sapiens
  source 1..22: mol_type = other DNA
cactcacctctgcatctctggt

SEQ ID NO: 4867 - DNA, 22 bp, Homo sapiens
  source 1..22: mol_type = other DNA
tcatcacctctgctgctcgggg

SEQ ID NO: 4868 - DNA, 23 bp, Homo sapiens
  source 1..23: mol_type = other DNA
cactcacttctgcatggtcatgg

SEQ ID NO: 4869 - DNA, 22 bp, Homo sapiens
  source 1..22: mol_type = other DNA
tactcactctgcatgtactcag

SEQ ID NO: 4870 - DNA, 22 bp, Homo sapiens
  source 1..22: mol_type = other DNA
tcattacccagcatgctcaggg

SEQ ID NO: 4871 - DNA, 23 bp, Homo sapiens
  source 1..23: mol_type = other DNA
ctgccaccactgcatgcacaggg

SEQ ID NO: 4872 - DNA, 22 bp, Homo sapiens
  source 1..22: mol_type = other DNA
tactcacatcgtatgcccatgg

SEQ ID NO: 4873 - DNA, 22 bp, Homo sapiens
  source 1..22: mol_type = other DNA
tgctacctctgcatgtccaggc

SEQ ID NO: 4874 - DNA, 22 bp, Homo sapiens
  source 1..22: mol_type = other DNA
cacccactctacatgcccacgg

SEQ ID NO: 4875 - DNA, 22 bp, Homo sapiens
  source 1..22: mol_type = other DNA
cattcaccctgcatgctctcag

SEQ ID NO: 4876 - DNA, 22 bp, Homo sapiens
  source 1..22: mol_type = other DNA
ttcacacctctgcagcccatgg

SEQ ID NO: 4877 - DNA, 23 bp, Homo sapiens
  source 1..23: mol_type = other DNA
tctgtatctctgcatgctcaggc

SEQ ID NO: 4878 - DNA, 23 bp, Homo sapiens
  source 1..23: mol_type = other DNA
tcctcacctctccctgctcaggg

SEQ ID NO: 4879 - DNA, 22 bp, Homo sapiens
  source 1..22: mol_type = other DNA
gacaaactatgcatgctcaggg

SEQ ID NO: 4880 - DNA, 23 bp, Homo sapiens
  source 1..23: mol_type = other DNA
tacttatctctgcatctccagga

SEQ ID NO: 4881 - DNA, 22 bp, Homo sapiens
  source 1..22: mol_type = other DNA
ctctcaccttgcaagttcatgg

SEQ ID NO: 4882 - DNA, 23 bp, Homo sapiens
  source 1..23: mol_type = other DNA
atttcacttctgcatgctctggg

SEQ ID NO: 4883 - DNA, 23 bp, Homo sapiens
  source 1..23: mol_type = other DNA
cagttcccactgcatgcgcatgg

SEQ ID NO: 4884 - DNA, 22 bp, Homo sapiens
  source 1..22: mol_type = other DNA
tgatcatatctcatgctcatgg

SEQ ID NO: 4885 - DNA, 22 bp, Homo sapiens
  source 1..22: mol_type = other DNA
tactacatctccatgcacaggg

SEQ ID NO: 4886 - DNA, 22 bp, Homo sapiens
  source 1..22: mol_type = other DNA
cacatacctctgcatcctaggg

SEQ ID NO: 4887 - DNA, 22 bp, Homo sapiens
  source 1..22: mol_type = other DNA
ttgccaccttgcatgctcatgg

SEQ ID NO: 4888 - DNA, 23 bp, Homo sapiens
  source 1..23: mol_type = other DNA
ttagcacctctgtatgctcagga

SEQ ID NO: 4889 - DNA, 23 bp, Homo sapiens
  source 1..23: mol_type = other DNA
tattcacgtctgcatgctcactg

SEQ ID NO: 4890 - DNA, 22 bp, Homo sapiens
  source 1..22: mol_type = other DNA
ttgtatctctgcttgctcaggg

SEQ ID NO: 4891 - DNA, 22 bp, Homo sapiens
  source 1..22: mol_type = other DNA
gactatctctgcatgttcagag

SEQ ID NO: 4892 - DNA, 22 bp, Homo sapiens
  source 1..22: mol_type = other DNA
gtttcacctctgcttctcatgg

SEQ ID NO: 4893 - DNA, 23 bp, Homo sapiens
  source 1..23: mol_type = other DNA
tactcacatctgcatcctttgga

SEQ ID NO: 4894 - DNA, 24 bp, Homo sapiens
  source 1..24: mol_type = other DNA
cactcactccctgcatgctcctgg

SEQ ID NO: 4895 - DNA, 23 bp, Homo sapiens
  source 1..23: mol_type = other DNA
tgcctccatctgcatgttcatgg

SEQ ID NO: 4896 - DNA, 23 bp, Homo sapiens
  source 1..23: mol_type = other DNA
tactcagctatgaatgctcaggg

SEQ ID NO: 4897 - DNA, 22 bp, Homo sapiens
  source 1..22: mol_type = other DNA
cactcacctctgcttctaaagg

SEQ ID NO: 4898 - DNA, 23 bp, Homo sapiens
  source 1..23: mol_type = other DNA
cacgcactcatgcatgcccatgg

SEQ ID NO: 4899 - DNA, 23 bp, Homo sapiens
  source 1..23: mol_type = other DNA
ccatcacctctgcatgcacagca

SEQ ID NO: 4900 - DNA, 24 bp, Homo sapiens
  source 1..24: mol_type = other DNA
tactcatccactgcatgtactggg

SEQ ID NO: 4901 - DNA, 22 bp, Homo sapiens
  source 1..22: mol_type = other DNA
taaaaaccttccatgctcatgg

SEQ ID NO: 4902 - DNA, 22 bp, Homo sapiens
  source 1..22: mol_type = other DNA
cagtcacccagcatgctctagg

SEQ ID NO: 4903 - DNA, 23 bp, Homo sapiens
  source 1..23: mol_type = other DNA
aaagtgactctgcatgctcaagg

SEQ ID NO: 4904 - DNA, 23 bp, Homo sapiens
  source 1..23: mol_type = other DNA
ttatcatctctgcatgctctgtg

SEQ ID NO: 4905 - DNA, 23 bp, Homo sapiens
  source 1..23: mol_type = other DNA
taatcaccactgcatccccaggg

SEQ ID NO: 4906 - DNA, 23 bp, Homo sapiens
  source 1..23: mol_type = other DNA
acattacctctgcatgctgatga

SEQ ID NO: 4907 - DNA, 24 bp, Homo sapiens
  source 1..24: mol_type = other DNA
tactctgcctctccatgctcaaag

SEQ ID NO: 4908 - DNA, 23 bp, Homo sapiens
  source 1..23: mol_type = other DNA
ttctcaccactgcatactcccag

SEQ ID NO: 4909 - DNA, 24 bp, Homo sapiens
  source 1..24: mol_type = other DNA
taatcacacactgcatgctctgga

SEQ ID NO: 4910 - DNA, 23 bp, Homo sapiens
  source 1..23: mol_type = other DNA
tacacacatatacatgctcacag

SEQ ID NO: 4911 - DNA, 23 bp, Homo sapiens
  source 1..23: mol_type = other DNA
ttcaaacctctgcatactctggt

SEQ ID NO: 4912 - DNA, 23 bp, Homo sapiens
  source 1..23: mol_type = other DNA
gaatgaaatctgcatgctcatga

SEQ ID NO: 4913 - DNA, 22 bp, Homo sapiens
  source 1..22: mol_type = other DNA
aaatcatctctgcatgccacgg

SEQ ID NO: 4914 - DNA, 23 bp, Homo sapiens
  source 1..23: mol_type = other DNA
tactcactactacatactcagta

SEQ ID NO: 4915 - DNA, 23 bp, Homo sapiens
  source 1..23: mol_type = other DNA
cacacacatctgccagctcacag

SEQ ID NO: 4916 - DNA, 23 bp, Homo sapiens
  source 1..23: mol_type = other DNA
tcctgcccactgcatgcgcctgg

SEQ ID NO: 4917 - DNA, 21 bp, Homo sapiens
  source 1..21: mol_type = other DNA
tacccacctccaagctcctgg

SEQ ID NO: 4918 - DNA, 23 bp, Homo sapiens
  source 1..23: mol_type = other DNA
tacccacttcagcgtgctcaagg

SEQ ID NO: 4919 - DNA, 22 bp, Homo sapiens
  source 1..22: mol_type = other DNA
aactaccactgcaagcccatgg

SEQ ID NO: 4920 - DNA, 22 bp, Homo sapiens
  source 1..22: mol_type = other DNA
tactcactgtgtatgctcaaag

SEQ ID NO: 4921 - DNA, 22 bp, Homo sapiens
  source 1..22: mol_type = other DNA
ccatcacctcttctgctcaagg

SEQ ID NO: 4922 - DNA, 23 bp, Homo sapiens
  source 1..23: mol_type = other DNA
tactcaaggcttcatgctgaggg

SEQ ID NO: 4923 - DNA, 23 bp, Homo sapiens
  source 1..23: mol_type = other DNA
ctttaacatctgcatgcacaagg

SEQ ID NO: 4924 - DNA, 23 bp, Homo sapiens
  source 1..23: mol_type = other DNA
tccccacctctgcatcccaaagt

SEQ ID NO: 4925 - DNA, 23 bp, Homo sapiens
  source 1..23: mol_type = other DNA
tatccagatctgcatgctccaga

SEQ ID NO: 4926 - DNA, 22 bp, Homo sapiens
  source 1..22: mol_type = other DNA
tactcaacctgcatgtaaaggg

SEQ ID NO: 4927 - DNA, 23 bp, Homo sapiens
  source 1..23: mol_type = other DNA
tcctttcctatccatgctctggg

SEQ ID NO: 4928 - DNA, 24 bp, Homo sapiens
  source 1..24: mol_type = other DNA
aactactcgtcttcatgctcatgg

SEQ ID NO: 4929 - DNA, 22 bp, Homo sapiens
  source 1..22: mol_type = other DNA
tactcactctgcaggctgaggc

SEQ ID NO: 4930 - DNA, 23 bp, Homo sapiens
  source 1..23: mol_type = other DNA
tattcaccactacatactaacag

SEQ ID NO: 4931 - DNA, 23 bp, Homo sapiens
  source 1..23: mol_type = other DNA
tactctcgtctgcataccccaga

SEQ ID NO: 4932 - DNA, 23 bp, Homo sapiens
  source 1..23: mol_type = other DNA
aagacacctgagcatgctgaagg

SEQ ID NO: 4933 - DNA, 23 bp, Homo sapiens
  source 1..23: mol_type = other DNA
tattcagctctaaatgctctggt

SEQ ID NO: 4934 - DNA, 23 bp, Homo sapiens
  source 1..23: mol_type = other DNA
tccataccactgcatgttccagg

SEQ ID NO: 4935 - DNA, 24 bp, Homo sapiens
  source 1..24: mol_type = other DNA
tactatatctctgcatccccaggg

SEQ ID NO: 4936 - DNA, 24 bp, Homo sapiens
  source 1..24: mol_type = other DNA
tactcacctcttgcaggcacaggg

SEQ ID NO: 4937 - DNA, 23 bp, Homo sapiens
  source 1..23: mol_type = other DNA
cacccacctcagcctcctaaagg

SEQ ID NO: 4938 - DNA, 23 bp, Homo sapiens
  source 1..23: mol_type = other DNA
tgctgccctatgcatgctgaggg

SEQ ID NO: 4939 - DNA, 23 bp, Homo sapiens
  source 1..23: mol_type = other DNA
tattcatctctgtatcatcagag

SEQ ID NO: 4940 - DNA, 23 bp, Homo sapiens
  source 1..23: mol_type = other DNA
cactcacctcagcctcctaaagt

SEQ ID NO: 4941 - DNA, 23 bp, Homo sapiens
  source 1..23: mol_type = other DNA
ctctcacctctgcatcttcacta

SEQ ID NO: 4942 - DNA, 23 bp, Homo sapiens
  source 1..23: mol_type = other DNA
cactcacccctgcataataagga

SEQ ID NO: 4943 - DNA, 23 bp, Homo sapiens
  source 1..23: mol_type = other DNA
tactccttgctccatgctcattg

SEQ ID NO: 4944 - DNA, 23 bp, Homo sapiens
  source 1..23: mol_type = other DNA
ttcccaactctctgtgctcatgg

SEQ ID NO: 4945 - DNA, 22 bp, Homo sapiens
  source 1..22: mol_type = other DNA
gaataacctctgatggtcaagg

SEQ ID NO: 4946 - DNA, 23 bp, Homo sapiens
  source 1..23: mol_type = other DNA
tattcacctctgcatgctctgag

SEQ ID NO: 4947 - DNA, 22 bp, Homo sapiens
  source 1..22: mol_type = other DNA
cactcatcctgcatgctcaaat

SEQ ID NO: 4948 - DNA, 23 bp, Homo sapiens
  source 1..23: mol_type = other DNA
tgctcacctctgcatcttaagga

SEQ ID NO: 4949 - DNA, 22 bp, Homo sapiens
  source 1..22: mol_type = other DNA
cacacaccctgcatactcaggg

SEQ ID NO: 4950 - DNA, 22 bp, Homo sapiens
  source 1..22: mol_type = other DNA
atctcacctctgctgttcaggg

SEQ ID NO: 4951 - DNA, 23 bp, Homo sapiens
  source 1..23: mol_type = other DNA
taagcaccactgcatgcaccagg

SEQ ID NO: 4952 - DNA, 23 bp, Homo sapiens
  source 1..23: mol_type = other DNA
acttcatctctgcatgctctgag

SEQ ID NO: 4953 - DNA, 23 bp, Homo sapiens
  source 1..23: mol_type = other DNA
atttcatatctgcatgctcttgg

SEQ ID NO: 4954 - DNA, 22 bp, Homo sapiens
  source 1..22: mol_type = other DNA
ctctcacctcagcatcccaagg

SEQ ID NO: 4955 - DNA, 23 bp, Homo sapiens
  source 1..23: mol_type = other DNA
gctttacctctgcatgttcctgg

SEQ ID NO: 4956 - DNA, 22 bp, Homo sapiens
  source 1..22: mol_type = other DNA
tactcacctcagctgctaaagg

SEQ ID NO: 4957 - DNA, 23 bp, Homo sapiens
  source 1..23: mol_type = other DNA
atctaacctctgcttgctcatgg

SEQ ID NO: 4958 - DNA, 22 bp, Homo sapiens
  source 1..22: mol_type = other DNA
tattaactctgcatactcagag

SEQ ID NO: 4959 - DNA, 23 bp, Homo sapiens
  source 1..23: mol_type = other DNA
tattcacctctgcatttctaagg

SEQ ID NO: 4960 - DNA, 22 bp, Homo sapiens
  source 1..22: mol_type = other DNA
cactcaccctacatcctctggg

SEQ ID NO: 4961 - DNA, 22 bp, Homo sapiens
  source 1..22: mol_type = other DNA
ttctatatcagcatgctcaggg

SEQ ID NO: 4962 - DNA, 22 bp, Homo sapiens
  source 1..22: mol_type = other DNA
tactccatctgcatattcatgg

SEQ ID NO: 4963 - DNA, 23 bp, Homo sapiens
  source 1..23: mol_type = other DNA
taggtcacactgcatgctcaggg

SEQ ID NO: 4964 - DNA, 22 bp, Homo sapiens
  source 1..22: mol_type = other DNA
ccttcacctctcttgctcatgg

SEQ ID NO: 4965 - DNA, 23 bp, Homo sapiens
  source 1..23: mol_type = other DNA
tgctcactctcacatgctcacgg

SEQ ID NO: 4966 - DNA, 23 bp, Homo sapiens
  source 1..23: mol_type = other DNA
tactcaactctgcattcatagca

SEQ ID NO: 4967 - DNA, 23 bp, Homo sapiens
  source 1..23: mol_type = other DNA
tacttagatctacatgctcaggg

SEQ ID NO: 4968 - DNA, 23 bp, Homo sapiens
  source 1..23: mol_type = other DNA
aacatacctcaccatgctcaagg

SEQ ID NO: 4969 - DNA, 23 bp, Homo sapiens
  source 1..23: mol_type = other DNA
tcctcacctctgcagccccaggg

SEQ ID NO: 4970 - DNA, 22 bp, Homo sapiens
  source 1..22: mol_type = other DNA
acctcacccagcaagctcaagg

SEQ ID NO: 4971 - DNA, 23 bp, Homo sapiens
  source 1..23: mol_type = other DNA
ctatttcctctgcatgcttaagg

SEQ ID NO: 4972 - DNA, 23 bp, Homo sapiens
  source 1..23: mol_type = other DNA
gatgcacctctccatgctctggg

SEQ ID NO: 4973 - DNA, 23 bp, Homo sapiens
  source 1..23: mol_type = other DNA
tactcctctctacatacacaggg

SEQ ID NO: 4974 - DNA, 23 bp, Homo sapiens
  source 1..23: mol_type = other DNA
cgcttaccaatgcatgcttaagg

SEQ ID NO: 4975 - DNA, 23 bp, Homo sapiens
  source 1..23: mol_type = other DNA
cactcacctctgcatgccaaaag

SEQ ID NO: 4976 - DNA, 23 bp, Homo sapiens
  source 1..23: mol_type = other DNA
tactcatctctgcatgctgcaca

SEQ ID NO: 4977 - DNA, 24 bp, Homo sapiens
  source 1..24: mol_type = other DNA
taagcaccctctgcatgctccctg

SEQ ID NO: 4978 - DNA, 23 bp, Homo sapiens
  source 1..23: mol_type = other DNA
ttcacaattctgcatgctctagg

SEQ ID NO: 4979 - DNA, 24 bp, Homo sapiens
  source 1..24: mol_type = other DNA
tagacaccatctgcatgctcagga

SEQ ID NO: 4980 - DNA, 23 bp, Homo sapiens
  source 1..23: mol_type = other DNA
tggtgaactatgcatgctcatgg

SEQ ID NO: 4981 - DNA, 23 bp, Homo sapiens
  source 1..23: mol_type = other DNA
cactcacctctgcctcccaaggt

SEQ ID NO: 4982 - DNA, 22 bp, Homo sapiens
  source 1..22: mol_type = other DNA
caccaccactgcatgcacacag

SEQ ID NO: 4983 - DNA, 23 bp, Homo sapiens
  source 1..23: mol_type = other DNA
tacaaagccatgcatgctcatgg

SEQ ID NO: 4984 - DNA, 22 bp, Homo sapiens
  source 1..22: mol_type = other DNA
gaatcacatctcatgctcatgg

SEQ ID NO: 4985 - DNA, 22 bp, Homo sapiens
  source 1..22: mol_type = other DNA
tcttcactctgcatgttcctgg

SEQ ID NO: 4986 - DNA, 23 bp, Homo sapiens
  source 1..23: mol_type = other DNA
tgctggtcactgcatgctcatga

SEQ ID NO: 4987 - DNA, 23 bp, Homo sapiens
  source 1..23: mol_type = other DNA
acctcacctctgcatgcttaagt

SEQ ID NO: 4988 - DNA, 22 bp, Homo sapiens
  source 1..22: mol_type = other DNA
gactacctcagcaagctcagag

SEQ ID NO: 4989 - DNA, 23 bp, Homo sapiens
  source 1..23: mol_type = other DNA
ttctaccctccccatgctctagg

SEQ ID NO: 4990 - DNA, 22 bp, Homo sapiens
  source 1..22: mol_type = other DNA
aacgtaccttccatgctcatgg

SEQ ID NO: 4991 - DNA, 22 bp, Homo sapiens
  source 1..22: mol_type = other DNA
tagtctactctcatgctccagg

SEQ ID NO: 4992 - DNA, 22 bp, Homo sapiens
  source 1..22: mol_type = other DNA
ttctcattatgcatgctcctgg

SEQ ID NO: 4993 - DNA, 23 bp, Homo sapiens
  source 1..23: mol_type = other DNA
tttctaccactgcatcctcatgg

SEQ ID NO: 4994 - DNA, 22 bp, Homo sapiens
  source 1..22: mol_type = other DNA
taatcccatctcatgctcacgg

SEQ ID NO: 4995 - DNA, 22 bp, Homo sapiens
  source 1..22: mol_type = other DNA
tactcattctccatgctctatg

SEQ ID NO: 4996 - DNA, 23 bp, Homo sapiens
  source 1..23: mol_type = other DNA
aatacacctctgccatctcaggg

SEQ ID NO: 4997 - DNA, 23 bp, Homo sapiens
  source 1..23: mol_type = other DNA
taccactctctgcatgcccatga

SEQ ID NO: 4998 - DNA, 22 bp, Homo sapiens
  source 1..22: mol_type = other DNA
gagacagctctcatgctcatgg

SEQ ID NO: 4999 - DNA, 22 bp, Homo sapiens
  source 1..22: mol_type = other DNA
tgatcaactctgatgatcatgg

SEQ ID NO: 5000 - DNA, 22 bp, Homo sapiens
  source 1..22: mol_type = other DNA
cattctctctccatgctcatgg

SEQ ID NO: 5001 - DNA, 23 bp, Homo sapiens
  source 1..23: mol_type = other DNA
aaccagcatttgcatgctcaggg

SEQ ID NO: 5002 - DNA, 23 bp, Homo sapiens
  source 1..23: mol_type = other DNA
gtcacatcacagcatgctcaagg

SEQ ID NO: 5003 - DNA, 22 bp, Homo sapiens
  source 1..22: mol_type = other DNA
gactacctgtacatgctcagtg

SEQ ID NO: 5004 - DNA, 24 bp, Homo sapiens
  source 1..24: mol_type = other DNA
aactgcaccactgcatgctctagc

SEQ ID NO: 5005 - DNA, 22 bp, Homo sapiens
  source 1..22: mol_type = other DNA
tgctcaagtagcatgctcaagg

SEQ ID NO: 5006 - DNA, 22 bp, Homo sapiens
  source 1..22: mol_type = other DNA
cactcagatctgcagctcaggg

SEQ ID NO: 5007 - DNA, 23 bp, Homo sapiens
  source 1..23: mol_type = other DNA
tccttcacactgaatgctcatgg

SEQ ID NO: 5008 - DNA, 23 bp, Homo sapiens
  source 1..23: mol_type = other DNA
cactcacctctgcctgtctagga

SEQ ID NO: 5009 - DNA, 23 bp, Homo sapiens
  source 1..23: mol_type = other DNA
cactcccctcagcatacacagtg

SEQ ID NO: 5010 - DNA, 24 bp, Homo sapiens
  source 1..24: mol_type = other DNA
ctctcacattctccatgctcaagg

SEQ ID NO: 5011 - DNA, 23 bp, Homo sapiens
  source 1..23: mol_type = other DNA
aagccaccactgcacgcccatgg

SEQ ID NO: 5012 - DNA, 22 bp, Homo sapiens
  source 1..22: mol_type = other DNA
tgctacctttgcatgttccagg

SEQ ID NO: 5013 - DNA, 23 bp, Homo sapiens
  source 1..23: mol_type = other DNA
cccccaccccttcatgctcagag

SEQ ID NO: 5014 - DNA, 23 bp, Homo sapiens
  source 1..23: mol_type = other DNA
ttcttagttctccatgctcatgg

SEQ ID NO: 5015 - DNA, 23 bp, Homo sapiens
  source 1..23: mol_type = other DNA
cactctattctgcatgcacaggg

SEQ ID NO: 5016 - DNA, 24 bp, Homo sapiens
  source 1..24: mol_type = other DNA
tcctcacccccagcatgcccaggg

SEQ ID NO: 5017 - DNA, 22 bp, Homo sapiens
  source 1..22: mol_type = other DNA
aattcacctctcttgctcacag

SEQ ID NO: 5018 - DNA, 21 bp, Homo sapiens
  source 1..21: mol_type = other DNA
tactcctcagcatgcacgtgg

SEQ ID NO: 5019 - DNA, 23 bp, Homo sapiens
  source 1..23: mol_type = other DNA
aactcatctctgtatcctcaggg

SEQ ID NO: 5020 - DNA, 22 bp, Homo sapiens
  source 1..22: mol_type = other DNA
aaaacacctctgtatgtcatgg

SEQ ID NO: 5021 - DNA, 24 bp, Homo sapiens
  source 1..24: mol_type = other DNA
ttttcacctctgcatttctgaggg

SEQ ID NO: 5022 - DNA, 22 bp, Homo sapiens
  source 1..22: mol_type = other DNA
tactcccactgcatgagaaagg

SEQ ID NO: 5023 - DNA, 22 bp, Homo sapiens
  source 1..22: mol_type = other DNA
tccccaccagtgcagctcaggg

SEQ ID NO: 5024 - DNA, 23 bp, Homo sapiens
  source 1..23: mol_type = other DNA
cactctcacctgcatgctgagga

SEQ ID NO: 5025 - DNA, 23 bp, Homo sapiens
  source 1..23: mol_type = other DNA
ttctcaccactgtatactgaagg

SEQ ID NO: 5026 - DNA, 22 bp, Homo sapiens
  source 1..22: mol_type = other DNA
gagtcatcactgatgctcaggg

SEQ ID NO: 5027 - DNA, 22 bp, Homo sapiens
  source 1..22: mol_type = other DNA
aaaccagctctgcatgccaggg

SEQ ID NO: 5028 - DNA, 21 bp, Homo sapiens
  source 1..21: mol_type = other DNA
ctctcacctctgctctcatgg

SEQ ID NO: 5029 - DNA, 23 bp, Homo sapiens
  source 1..23: mol_type = other DNA
aaggaacctctgcatcctcaggg

SEQ ID NO: 5030 - DNA, 23 bp, Homo sapiens
  source 1..23: mol_type = other DNA
cactcaagtctgcaggttcatag

SEQ ID NO: 5031 - DNA, 23 bp, Homo sapiens
  source 1..23: mol_type = other DNA
tccttacacctgcatgatcaagg

SEQ ID NO: 5032 - DNA, 22 bp, Homo sapiens
  source 1..22: mol_type = other DNA
ttatcacctttgcatctcaggt

SEQ ID NO: 5033 - DNA, 23 bp, Homo sapiens
  source 1..23: mol_type = other DNA
cactcacctctgcaaatccaggg

SEQ ID NO: 5034 - DNA, 23 bp, Homo sapiens
  source 1..23: mol_type = other DNA
tactcatctaatcctgcacaggg

SEQ ID NO: 5035 - DNA, 25 bp, Homo sapiens
  source 1..25: mol_type = other DNA
tactcacctcagcatcaggccaggt

SEQ ID NO: 5036 - DNA, 24 bp, Homo sapiens
  source 1..24: mol_type = other DNA
tactcagctctgcctgactccaag

SEQ ID NO: 5037 - DNA, 23 bp, Homo sapiens
  source 1..23: mol_type = other DNA
gaaacaccactgcattcccaggg

SEQ ID NO: 5038 - DNA, 23 bp, Homo sapiens
  source 1..23: mol_type = other DNA
gtatcacccctgcatgctcttgg

SEQ ID NO: 5039 - DNA, 22 bp, Homo sapiens
  source 1..22: mol_type = other DNA
tccacaccttgtatgctcaggg

SEQ ID NO: 5040 - DNA, 23 bp, Homo sapiens
  source 1..23: mol_type = other DNA
atcccacctctacatgctaaagg

SEQ ID NO: 5041 - DNA, 24 bp, Homo sapiens
  source 1..24: mol_type = other DNA
tcctatacctcagtatgctcatgg

SEQ ID NO: 5042 - DNA, 21 bp, Homo sapiens
  source 1..21: mol_type = other DNA
tgcttatctgcatgctcagag

SEQ ID NO: 5043 - DNA, 23 bp, Homo sapiens
  source 1..23: mol_type = other DNA
caatgtactctgcatgcttatgg

SEQ ID NO: 5044 - DNA, 22 bp, Homo sapiens
  source 1..22: mol_type = other DNA
tactcacctctgatgttccggg

SEQ ID NO: 5045 - DNA, 21 bp, Homo sapiens
  source 1..21: mol_type = other DNA
gactcatctgcatgctccttg

SEQ ID NO: 5046 - DNA, 23 bp, Homo sapiens
  source 1..23: mol_type = other DNA
gacatacatatgcatgcttatgg

SEQ ID NO: 5047 - DNA, 23 bp, Homo sapiens
  source 1..23: mol_type = other DNA
tactctctactgcatgtctaggg

SEQ ID NO: 5048 - DNA, 23 bp, Homo sapiens
  source 1..23: mol_type = other DNA
atcctacctctgcttgctctggg

SEQ ID NO: 5049 - DNA, 22 bp, Homo sapiens
  source 1..22: mol_type = other DNA
aacttccactgcatgctcatgc

SEQ ID NO: 5050 - DNA, 22 bp, Homo sapiens
  source 1..22: mol_type = other DNA
taatgcctctacatgctcactg

SEQ ID NO: 5051 - DNA, 22 bp, Homo sapiens
  source 1..22: mol_type = other DNA
tccccaccacacatgctcaggg

SEQ ID NO: 5052 - DNA, 23 bp, Homo sapiens
  source 1..23: mol_type = other DNA
tgctcacatctgtatgcacatgg

SEQ ID NO: 5053 - DNA, 21 bp, Homo sapiens
  source 1..21: mol_type = other DNA
tacacacatccatgctcaagg

SEQ ID NO: 5054 - DNA, 23 bp, Homo sapiens
  source 1..23: mol_type = other DNA
caatcacctctgcattctcagtg

SEQ ID NO: 5055 - DNA, 23 bp, Homo sapiens
  source 1..23: mol_type = other DNA
aagcctcatctgcatgctcaggg

SEQ ID NO: 5056 - DNA, 23 bp, Homo sapiens
  source 1..23: mol_type = other DNA
cactcaccctcacatgcccacgg

SEQ ID NO: 5057 - DNA, 22 bp, Homo sapiens
  source 1..22: mol_type = other DNA
tcttcaccactgcatcacatgg

SEQ ID NO: 5058 - DNA, 23 bp, Homo sapiens
  source 1..23: mol_type = other DNA
ttgactcatctgcttgctcatgg

SEQ ID NO: 5059 - DNA, 23 bp, Homo sapiens
  source 1..23: mol_type = other DNA
aacctaacactgcatactcatgg

SEQ ID NO: 5060 - DNA, 23 bp, Homo sapiens
  source 1..23: mol_type = other DNA
tactcacttccacatgctccata

SEQ ID NO: 5061 - DNA, 23 bp, Homo sapiens
  source 1..23: mol_type = other DNA
tttgaacctctccatgcttatgg

SEQ ID NO: 5062 - DNA, 22 bp, Homo sapiens
  source 1..22: mol_type = other DNA
cactaacctcacatgcacacgg

SEQ ID NO: 5063 - DNA, 21 bp, Homo sapiens
  source 1..21: mol_type = other DNA
tactcatctgcatgcacatgc

SEQ ID NO: 5064 - DNA, 22 bp, Homo sapiens
  source 1..22: mol_type = other DNA
taatcaccctgcatgttcacgc

SEQ ID NO: 5065 - DNA, 24 bp, Homo sapiens
  source 1..24: mol_type = other DNA
aaatcacctatgcattgctcatgg

SEQ ID NO: 5066 - DNA, 23 bp, Homo sapiens
  source 1..23: mol_type = other DNA
tgatcacatctgattgctcactg

SEQ ID NO: 5067 - DNA, 21 bp, Homo sapiens
  source 1..21: mol_type = other DNA
tcctcacctccatgcccacag

SEQ ID NO: 5068 - DNA, 22 bp, Homo sapiens
  source 1..22: mol_type = other DNA
taatcatccttgcatctcaggg

SEQ ID NO: 5069 - DNA, 23 bp, Homo sapiens
  source 1..23: mol_type = other DNA
caaactcccctgcatgctcagtg

SEQ ID NO: 5070 - DNA, 23 bp, Homo sapiens
  source 1..23: mol_type = other DNA
ttgcaagctctgcatgctcatgg

SEQ ID NO: 5071 - DNA, 23 bp, Homo sapiens
  source 1..23: mol_type = other DNA
tgaagacctccacatgctcaagg

SEQ ID NO: 5072 - DNA, 23 bp, Homo sapiens
  source 1..23: mol_type = other DNA
tatcctagtctgtatgctcaagg

SEQ ID NO: 5073 - DNA, 22 bp, Homo sapiens
  source 1..22: mol_type = other DNA
gaaacacatctcatgctcacgg

SEQ ID NO: 5074 - DNA, 23 bp, Homo sapiens
  source 1..23: mol_type = other DNA
cactcacctctgcacgctgaagg

SEQ ID NO: 5075 - DNA, 23 bp, Homo sapiens
  source 1..23: mol_type = other DNA
cattcaccactgtatacccaggg

SEQ ID NO: 5076 - DNA, 21 bp, Homo sapiens
  source 1..21: mol_type = other DNA
ctcccacctctgcattcatgg

SEQ ID NO: 5077 - DNA, 22 bp, Homo sapiens
  source 1..22: mol_type = other DNA
cactcattctgcatgtgcaggg

SEQ ID NO: 5078 - DNA, 22 bp, Homo sapiens
  source 1..22: mol_type = other DNA
tcctcacctcccaagctcaggg

SEQ ID NO: 5079 - DNA, 23 bp, Homo sapiens
  source 1..23: mol_type = other DNA
cattcacctttgcatctccaggg

SEQ ID NO: 5080 - DNA, 23 bp, Homo sapiens
  source 1..23: mol_type = other DNA
tgctcactgctacatgcccaagg

SEQ ID NO: 5081 - DNA, 22 bp, Homo sapiens
  source 1..22: mol_type = other DNA
tactgcactctgcagctctggg

SEQ ID NO: 5082 - DNA, 23 bp, Homo sapiens
  source 1..23: mol_type = other DNA
gacagaccaatgcttgctcaagg

SEQ ID NO: 5083 - DNA, 22 bp, Homo sapiens
  source 1..22: mol_type = other DNA
tattcatctctacatctctagg

SEQ ID NO: 5084 - DNA, 23 bp, Homo sapiens
  source 1..23: mol_type = other DNA
tcctaccctcaccaagctcatgg

SEQ ID NO: 5085 - DNA, 22 bp, Homo sapiens
  source 1..22: mol_type = other DNA
tgcacaccactgcatctctagg

SEQ ID NO: 5086 - DNA, 23 bp, Homo sapiens
  source 1..23: mol_type = other DNA
tattcacctctgtatccccaggg

SEQ ID NO: 5087 - DNA, 24 bp, Homo sapiens
  source 1..24: mol_type = other DNA
ttcttacctctagcatgctcttga

SEQ ID NO: 5088 - DNA, 22 bp, Homo sapiens
  source 1..22: mol_type = other DNA
tactcacctcttcatattagga

SEQ ID NO: 5089 - DNA, 23 bp, Homo sapiens
  source 1..23: mol_type = other DNA
tacttacatctgcatgatcagtg

SEQ ID NO: 5090 - DNA, 21 bp, Homo sapiens
  source 1..21: mol_type = other DNA
cattcatctggatgctcaagg

SEQ ID NO: 5091 - DNA, 23 bp, Homo sapiens
  source 1..23: mol_type = other DNA
taatcagctcagcatgcccaaat

SEQ ID NO: 5092 - DNA, 23 bp, Homo sapiens
  source 1..23: mol_type = other DNA
tactcacccctccatgcccacct

SEQ ID NO: 5093 - DNA, 23 bp, Homo sapiens
  source 1..23: mol_type = other DNA
gaggccccactgcctgctcatgg

SEQ ID NO: 5094 - DNA, 22 bp, Homo sapiens
  source 1..22: mol_type = other DNA
tacccacctctcatgctcattt

SEQ ID NO: 5095 - DNA, 23 bp, Homo sapiens
  source 1..23: mol_type = other DNA
cactcacttctacattcacatgg

SEQ ID NO: 5096 - DNA, 23 bp, Homo sapiens
  source 1..23: mol_type = other DNA
aaattaactcttcttgctcaggg

SEQ ID NO: 5097 - DNA, 22 bp, Homo sapiens
  source 1..22: mol_type = other DNA
tactccaagtgcatgctgaggg

SEQ ID NO: 5098 - DNA, 23 bp, Homo sapiens
  source 1..23: mol_type = other DNA
tactcacctttacatcccatagg

SEQ ID NO: 5099 - DNA, 23 bp, Homo sapiens
  source 1..23: mol_type = other DNA
gattaatctctgcatagtcatgg

SEQ ID NO: 5100 - DNA, 24 bp, Homo sapiens
  source 1..24: mol_type = other DNA
tactcacatcctgcatggacatgg

SEQ ID NO: 5101 - DNA, 23 bp, Homo sapiens
  source 1..23: mol_type = other DNA
tactcaactctgtatccctagag

SEQ ID NO: 5102 - DNA, 23 bp, Homo sapiens
  source 1..23: mol_type = other DNA
ttctgatctctacaagctcatgt

SEQ ID NO: 5103 - DNA, 23 bp, Homo sapiens
  source 1..23: mol_type = other DNA
tacttacctcagcatctactggg

SEQ ID NO: 5104 - DNA, 23 bp, Homo sapiens
  source 1..23: mol_type = other DNA
ttttctcatttgcatgcccatgg

SEQ ID NO: 5105 - DNA, 22 bp, Homo sapiens
  source 1..22: mol_type = other DNA
tactgacctctgaatctcgtgc

SEQ ID NO: 5106 - DNA, 22 bp, Homo sapiens
  source 1..22: mol_type = other DNA
tacccacctctgcagctggagg

SEQ ID NO: 5107 - DNA, 23 bp, Homo sapiens
  source 1..23: mol_type = other DNA
taacctcctctccatggttatgg

SEQ ID NO: 5108 - DNA, 24 bp, Homo sapiens
  source 1..24: mol_type = other DNA
tattcacatctgagttgctcaagg

SEQ ID NO: 5109 - DNA, 22 bp, Homo sapiens
  source 1..22: mol_type = other DNA
tactcagtctccatgagcaggg

SEQ ID NO: 5110 - DNA, 21 bp, Homo sapiens
  source 1..21: mol_type = other DNA
taaacacctccgcattcaagg

SEQ ID NO: 5111 - DNA, 23 bp, Homo sapiens
  source 1..23: mol_type = other DNA
ttctctatactgcattctcaagg

SEQ ID NO: 5112 - DNA, 23 bp, Homo sapiens
  source 1..23: mol_type = other DNA
gactcagctctggaggctctgag

SEQ ID NO: 5113 - DNA, 23 bp, Homo sapiens
  source 1..23: mol_type = other DNA
ggctcacctctgcatgtcgctgg

SEQ ID NO: 5114 - DNA, 23 bp, Homo sapiens
  source 1..23: mol_type = other DNA
tgccctcagctgcatgcccaagg

SEQ ID NO: 5115 - DNA, 25 bp, Homo sapiens
  source 1..25: mol_type = other DNA
tactcacctcaatcctggctctcgg

SEQ ID NO: 5116 - DNA, 22 bp, Homo sapiens
  source 1..22: mol_type = other DNA
tattcagcaatgcatgtcaagg

SEQ ID NO: 5117 - DNA, 22 bp, Homo sapiens
  source 1..22: mol_type = other DNA
tacttaccttacatgttcaagg

SEQ ID NO: 5118 - DNA, 22 bp, Homo sapiens
  source 1..22: mol_type = other DNA
atcccaccccgcatgctcaggg

SEQ ID NO: 5119 - DNA, 23 bp, Homo sapiens
  source 1..23: mol_type = other DNA
gtctctactctacatgctctggg

SEQ ID NO: 5120 - DNA, 22 bp, Homo sapiens
  source 1..22: mol_type = other DNA
cacccacccagcatgctcttgg

SEQ ID NO: 5121 - DNA, 22 bp, Homo sapiens
  source 1..22: mol_type = other DNA
tactcaccaagcatggacacgg

SEQ ID NO: 5122 - DNA, 22 bp, Homo sapiens
  source 1..22: mol_type = other DNA
gcatcacctctgcatctcaaga

SEQ ID NO: 5123 - DNA, 22 bp, Homo sapiens
  source 1..22: mol_type = other DNA
tactaacctcacatgctcacag

SEQ ID NO: 5124 - DNA, 22 bp, Homo sapiens
  source 1..22: mol_type = other DNA
acgtcacctctgcatctcagcg

SEQ ID NO: 5125 - DNA, 23 bp, Homo sapiens
  source 1..23: mol_type = other DNA
gactctaccttgcacgctcaggg

SEQ ID NO: 5126 - DNA, 23 bp, Homo sapiens
  source 1..23: mol_type = other DNA
tgcatacatctgcatgctcctcg

SEQ ID NO: 5127 - DNA, 23 bp, Homo sapiens
  source 1..23: mol_type = other DNA
tgtattcctctgcaagctcatgg

SEQ ID NO: 5128 - DNA, 23 bp, Homo sapiens
  source 1..23: mol_type = other DNA
ctctcacccctacatacccatgg

SEQ ID NO: 5129 - DNA, 22 bp, Homo sapiens
  source 1..22: mol_type = other DNA
acctcacctctgctgcgcaagg

SEQ ID NO: 5130 - DNA, 23 bp, Homo sapiens
  source 1..23: mol_type = other DNA
cactgactatagcatgctcatgg

SEQ ID NO: 5131 - DNA, 22 bp, Homo sapiens
  source 1..22: mol_type = other DNA
cagacacctctgctgctctagg

SEQ ID NO: 5132 - DNA, 23 bp, Homo sapiens
  source 1..23: mol_type = other DNA
tcatcacctctgcatccccagga

SEQ ID NO: 5133 - DNA, 22 bp, Homo sapiens
  source 1..22: mol_type = other DNA
tatagcctctgcatgtccaggg

SEQ ID NO: 5134 - DNA, 23 bp, Homo sapiens
  source 1..23: mol_type = other DNA
aacccacctctacatgctatggt

SEQ ID NO: 5135 - DNA, 24 bp, Homo sapiens
  source 1..24: mol_type = other DNA
tgcaaaccatctgcaagctcaggg

SEQ ID NO: 5136 - DNA, 21 bp, Homo sapiens
  source 1..21: mol_type = other DNA
tactactctaaatgctcaggg

SEQ ID NO: 5137 - DNA, 23 bp, Homo sapiens
  source 1..23: mol_type = other DNA
tcatcatatctgcatgcttatag

SEQ ID NO: 5138 - DNA, 23 bp, Homo sapiens
  source 1..23: mol_type = other DNA
tacaaacctctacatattcaagg

SEQ ID NO: 5139 - DNA, 23 bp, Homo sapiens
  source 1..23: mol_type = other DNA
aaaactcctctgcatactcatga

SEQ ID NO: 5140 - DNA, 23 bp, Homo sapiens
  source 1..23: mol_type = other DNA
atcctacccctgcctgctcaggg

SEQ ID NO: 5141 - DNA, 23 bp, Homo sapiens
  source 1..23: mol_type = other DNA
ttcccatttctgcatgctcagag

SEQ ID NO: 5142 - DNA, 23 bp, Homo sapiens
  source 1..23: mol_type = other DNA
cagaaacctcagcatgctctagg

SEQ ID NO: 5143 - DNA, 23 bp, Homo sapiens
  source 1..23: mol_type = other DNA
aacccacctctgcatactattgg

SEQ ID NO: 5144 - DNA, 24 bp, Homo sapiens
  source 1..24: mol_type = other DNA
taaacactcactgcatgctcaggc

SEQ ID NO: 5145 - DNA, 23 bp, Homo sapiens
  source 1..23: mol_type = other DNA
cgcacacctatgcaggctcaggg

SEQ ID NO: 5146 - DNA, 23 bp, Homo sapiens
  source 1..23: mol_type = other DNA
aacattcctctgcatgctgaggt

SEQ ID NO: 5147 - DNA, 23 bp, Homo sapiens
  source 1..23: mol_type = other DNA
ttcacttcactgcatgctcaggg

SEQ ID NO: 5148 - DNA, 23 bp, Homo sapiens
  source 1..23: mol_type = other DNA
tatttcccactgcatgctcattg

SEQ ID NO: 5149 - DNA, 23 bp, Homo sapiens
  source 1..23: mol_type = other DNA
tcattaccactgcaagcccaggg

SEQ ID NO: 5150 - DNA, 23 bp, Homo sapiens
  source 1..23: mol_type = other DNA
tactcacctgtgcacgcacgtcc

SEQ ID NO: 5151 - DNA, 23 bp, Homo sapiens
  source 1..23: mol_type = other DNA
cactcacctctccaggctcatcc

SEQ ID NO: 5152 - DNA, 23 bp, Homo sapiens
  source 1..23: mol_type = other DNA
tagttatttatgcatgctctggg

SEQ ID NO: 5153 - DNA, 22 bp, Homo sapiens
  source 1..22: mol_type = other DNA
taaacaaactgcatgctcatgg

SEQ ID NO: 5154 - DNA, 23 bp, Homo sapiens
  source 1..23: mol_type = other DNA
tacacacctatgcatgcacacac

SEQ ID NO: 5155 - DNA, 23 bp, Homo sapiens
  source 1..23: mol_type = other DNA
gattctaatctgcatgcttatgg

SEQ ID NO: 5156 - DNA, 22 bp, Homo sapiens
  source 1..22: mol_type = other DNA
tatgacctctgcttactcctgg

SEQ ID NO: 5157 - DNA, 23 bp, Homo sapiens
  source 1..23: mol_type = other DNA
gagtcacagctgcaagctaaggg

SEQ ID NO: 5158 - DNA, 23 bp, Homo sapiens
  source 1..23: mol_type = other DNA
tactcggcgctgaatactcaagc

SEQ ID NO: 5159 - DNA, 23 bp, Homo sapiens
  source 1..23: mol_type = other DNA
ttgacacatctgactgctcaggg

SEQ ID NO: 5160 - DNA, 22 bp, Homo sapiens
  source 1..22: mol_type = other DNA
acctcacctctgaatctctagg

SEQ ID NO: 5161 - DNA, 23 bp, Homo sapiens
  source 1..23: mol_type = other DNA
tactcaccactgattccccagag

SEQ ID NO: 5162 - DNA, 23 bp, Homo sapiens
  source 1..23: mol_type = other DNA
taaagaccactgcatgtccaagg

SEQ ID NO: 5163 - DNA, 23 bp, Homo sapiens
  source 1..23: mol_type = other DNA
tacccccatctgcatactcttgc

SEQ ID NO: 5164 - DNA, 21 bp, Homo sapiens
  source 1..21: mol_type = other DNA
caatcacctctgcgctcacgg

SEQ ID NO: 5165 - DNA, 23 bp, Homo sapiens
  source 1..23: mol_type = other DNA
tgttcaccccttcatgcccagga

SEQ ID NO: 5166 - DNA, 23 bp, Homo sapiens
  source 1..23: mol_type = other DNA
tacccacctcagcatcccaaagt

SEQ ID NO: 5167 - DNA, 23 bp, Homo sapiens
  source 1..23: mol_type = other DNA
ccttcacctctacattgtcatgg

SEQ ID NO: 5168 - DNA, 24 bp, Homo sapiens
  source 1..24: mol_type = other DNA
tactcatctccttcttgctcctgg

SEQ ID NO: 5169 - DNA, 21 bp, Homo sapiens
  source 1..21: mol_type = other DNA
taatatcctctgcactcaggg

SEQ ID NO: 5170 - DNA, 22 bp, Homo sapiens
  source 1..22: mol_type = other DNA
tccacatctctgctgctcaaag

SEQ ID NO: 5171 - DNA, 23 bp, Homo sapiens
  source 1..23: mol_type = other DNA
tactcatttcctcattcccatgg

SEQ ID NO: 5172 - DNA, 23 bp, Homo sapiens
  source 1..23: mol_type = other DNA
tactcatctctccctgagcagag

SEQ ID NO: 5173 - DNA, 23 bp, Homo sapiens
  source 1..23: mol_type = other DNA
tacacacatgtacatgtgcatgg

SEQ ID NO: 5174 - DNA, 22 bp, Homo sapiens
  source 1..22: mol_type = other DNA
tactcatttttcatgctcaggg

SEQ ID NO: 5175 - DNA, 22 bp, Homo sapiens
  source 1..22: mol_type = other DNA
tactcccctctactgtacaggg

SEQ ID NO: 5176 - DNA, 23 bp, Homo sapiens
  source 1..23: mol_type = other DNA
tactccaccatgcatgctcttgg

SEQ ID NO: 5177 - DNA, 23 bp, Homo sapiens
  source 1..23: mol_type = other DNA
ttataatatctgcatgctcttgg

SEQ ID NO: 5178 - DNA, 23 bp, Homo sapiens
  source 1..23: mol_type = other DNA
tactcagccctgcatgctcctgg

SEQ ID NO: 5179 - DNA, 22 bp, Homo sapiens
  source 1..22: mol_type = other DNA
tactcacctcgcatactcaatg

SEQ ID NO: 5180 - DNA, 22 bp, Homo sapiens
  source 1..22: mol_type = other DNA
tgtctacctctgatgctcatgg

SEQ ID NO: 5181 - DNA, 22 bp, Homo sapiens
  source 1..22: mol_type = other DNA
gactcaccctgcattctcgagg

SEQ ID NO: 5182 - DNA, 23 bp, Homo sapiens
  source 1..23: mol_type = other DNA
acaatacctctgcaagctcaggg

SEQ ID NO: 5183 - DNA, 23 bp, Homo sapiens
  source 1..23: mol_type = other DNA
ttctcacctctgcttgctgatgg

SEQ ID NO: 5184 - DNA, 23 bp, Homo sapiens
  source 1..23: mol_type = other DNA
gtctcacctctgcacgctaaagg

SEQ ID NO: 5185 - DNA, 22 bp, Homo sapiens
  source 1..22: mol_type = other DNA
ttctcacttctgcatcttatgg

SEQ ID NO: 5186 - DNA, 22 bp, Homo sapiens
  source 1..22: mol_type = other DNA
ttctacatctgcatgcttatgg

SEQ ID NO: 5187 - DNA, 23 bp, Homo sapiens
  source 1..23: mol_type = other DNA
aattgatatctacatgctcaagg

SEQ ID NO: 5188 - DNA, 24 bp, Homo sapiens
  source 1..24: mol_type = other DNA
ttcctacctctgcattgctcacgg

SEQ ID NO: 5189 - DNA, 22 bp, Homo sapiens
  source 1..22: mol_type = other DNA
cactccctctgcatgcccaggc

SEQ ID NO: 5190 - DNA, 23 bp, Homo sapiens
  source 1..23: mol_type = other DNA
agctcacctctgcatccccagag

SEQ ID NO: 5191 - DNA, 23 bp, Homo sapiens
  source 1..23: mol_type = other DNA
gtctcacctctgctgccccatgg

SEQ ID NO: 5192 - DNA, 22 bp, Homo sapiens
  source 1..22: mol_type = other DNA
ttagcacccctgcatgtcaagg

SEQ ID NO: 5193 - DNA, 22 bp, Homo sapiens
  source 1..22: mol_type = other DNA
tctttacctctcctgctcaggg

SEQ ID NO: 5194 - DNA, 21 bp, Homo sapiens
  source 1..21: mol_type = other DNA
tgctcacacgcatgctcaggg

SEQ ID NO: 5195 - DNA, 22 bp, Homo sapiens
  source 1..22: mol_type = other DNA
gaaacacctctcatgctcatag

SEQ ID NO: 5196 - DNA, 22 bp, Homo sapiens
  source 1..22: mol_type = other DNA
tgctcacatctaatgctcatgg

SEQ ID NO: 5197 - DNA, 22 bp, Homo sapiens
  source 1..22: mol_type = other DNA
acctcacctcagctgctctagg

SEQ ID NO: 5198 - DNA, 23 bp, Homo sapiens
  source 1..23: mol_type = other DNA
taattaaaacagcatgctcaggg

SEQ ID NO: 5199 - DNA, 23 bp, Homo sapiens
  source 1..23: mol_type = other DNA
tactcaccactgtattaacaagg

SEQ ID NO: 5200 - DNA, 24 bp, Homo sapiens
  source 1..24: mol_type = other DNA
tagtgaccatctacatggtcaggg

SEQ ID NO: 5201 - DNA, 22 bp, Homo sapiens
  source 1..22: mol_type = other DNA
tactcaccttacatgccagtgg

SEQ ID NO: 5202 - DNA, 22 bp, Homo sapiens
  source 1..22: mol_type = other DNA
gactcacctcccatcttcatgg

SEQ ID NO: 5203 - DNA, 22 bp, Homo sapiens
  source 1..22: mol_type = other DNA
caatccctctgcatgctcagga

SEQ ID NO: 5204 - DNA, 22 bp, Homo sapiens
  source 1..22: mol_type = other DNA
tagtatgcttgcatgctcatgg

SEQ ID NO: 5205 - DNA, 22 bp, Homo sapiens
  source 1..22: mol_type = other DNA
cattcttctctgcatgtcaggg

SEQ ID NO: 5206 - DNA, 22 bp, Homo sapiens
  source 1..22: mol_type = other DNA
tcagcatctctgctgctcaggg

SEQ ID NO: 5207 - DNA, 21 bp, Homo sapiens
  source 1..21: mol_type = other DNA
cactcacctccatgctcatgc

SEQ ID NO: 5208 - DNA, 23 bp, Homo sapiens
  source 1..23: mol_type = other DNA
gaaaaacatctccatgctcatgg

SEQ ID NO: 5209 - DNA, 22 bp, Homo sapiens
  source 1..22: mol_type = other DNA
taccaacccagcatgctcacga

SEQ ID NO: 5210 - DNA, 22 bp, Homo sapiens
  source 1..22: mol_type = other DNA
tagtacttctacatgcacaggg

SEQ ID NO: 5211 - DNA, 22 bp, Homo sapiens
  source 1..22: mol_type = other DNA
cgcccacctctgctgcccacgg

SEQ ID NO: 5212 - DNA, 23 bp, Homo sapiens
  source 1..23: mol_type = other DNA
ttcccaactcagcctgctcagtg

SEQ ID NO: 5213 - DNA, 23 bp, Homo sapiens
  source 1..23: mol_type = other DNA
cacacacatttgcatgttcatgg

SEQ ID NO: 5214 - DNA, 24 bp, Homo sapiens
  source 1..24: mol_type = other DNA
cactcacctcagccatgctgatgg

SEQ ID NO: 5215 - DNA, 23 bp, Homo sapiens
  source 1..23: mol_type = other DNA
tccataccactgcatgcttaaag

SEQ ID NO: 5216 - DNA, 23 bp, Homo sapiens
  source 1..23: mol_type = other DNA
tgtggacatctccatgctcaggg

SEQ ID NO: 5217 - DNA, 23 bp, Homo sapiens
  source 1..23: mol_type = other DNA
ttctcaaatttacatgctcgagg

SEQ ID NO: 5218 - DNA, 22 bp, Homo sapiens
  source 1..22: mol_type = other DNA
aggtcacctctgcacctcatgg

SEQ ID NO: 5219 - DNA, 21 bp, Homo sapiens
  source 1..21: mol_type = other DNA
ttcccaactctgcattcaggg

SEQ ID NO: 5220 - DNA, 23 bp, Homo sapiens
  source 1..23: mol_type = other DNA
tacttacctctgcctgcttctgg

SEQ ID NO: 5221 - DNA, 23 bp, Homo sapiens
  source 1..23: mol_type = other DNA
cacacacatatgcatgctcaagt

SEQ ID NO: 5222 - DNA, 22 bp, Homo sapiens
  source 1..22: mol_type = other DNA
tactcactctgcagtctcagcc

SEQ ID NO: 5223 - DNA, 23 bp, Homo sapiens
  source 1..23: mol_type = other DNA
ttcccacttttgcatgctcacat

SEQ ID NO: 5224 - DNA, 24 bp, Homo sapiens
  source 1..24: mol_type = other DNA
tactcacctctgatgtactccagg

SEQ ID NO: 5225 - DNA, 23 bp, Homo sapiens
  source 1..23: mol_type = other DNA
ttctcaccactgcatgctccctg

SEQ ID NO: 5226 - DNA, 21 bp, Homo sapiens
  source 1..21: mol_type = other DNA
tacacacctctgcacacactg

SEQ ID NO: 5227 - DNA, 23 bp, Homo sapiens
  source 1..23: mol_type = other DNA
aattcacctctgaatgctaaaca

SEQ ID NO: 5228 - DNA, 23 bp, Homo sapiens
  source 1..23: mol_type = other DNA
ttcccacccctgcatgctggagg

SEQ ID NO: 5229 - DNA, 23 bp, Homo sapiens
  source 1..23: mol_type = other DNA
tactcttccctggatgctttggg

SEQ ID NO: 5230 - DNA, 23 bp, Homo sapiens
  source 1..23: mol_type = other DNA
tattcacctctgcatctccacgt

SEQ ID NO: 5231 - DNA, 22 bp, Homo sapiens
  source 1..22: mol_type = other DNA
tactgacgtctgcatttcagtg

SEQ ID NO: 5232 - DNA, 23 bp, Homo sapiens
  source 1..23: mol_type = other DNA
taataccctctgcatgtgtatgg

SEQ ID NO: 5233 - DNA, 23 bp, Homo sapiens
  source 1..23: mol_type = other DNA
gactcacacctccaggctcctgg

SEQ ID NO: 5234 - DNA, 23 bp, Homo sapiens
  source 1..23: mol_type = other DNA
aaatcacaactgctggctcaggg

SEQ ID NO: 5235 - DNA, 22 bp, Homo sapiens
  source 1..22: mol_type = other DNA
tactcacctctccagctctggt

SEQ ID NO: 5236 - DNA, 25 bp, Homo sapiens
  source 1..25: mol_type = other DNA
aacctacctgtgccaatgctcaggg

SEQ ID NO: 5237 - DNA, 21 bp, Homo sapiens
  source 1..21: mol_type = other DNA
tcctcacccctgcactcaggt

SEQ ID NO: 5238 - DNA, 22 bp, Homo sapiens
  source 1..22: mol_type = other DNA
cactcacctctgcacctcacca

SEQ ID NO: 5239 - DNA, 23 bp, Homo sapiens
  source 1..23: mol_type = other DNA
cactcatctgttgatggtcatgg

SEQ ID NO: 5240 - DNA, 23 bp, Homo sapiens
  source 1..23: mol_type = other DNA
aacttacatctgcatgcccaaga

SEQ ID NO: 5241 - DNA, 23 bp, Homo sapiens
  source 1..23: mol_type = other DNA
tacttatctctgcatgcaccact

SEQ ID NO: 5242 - DNA, 22 bp, Homo sapiens
  source 1..22: mol_type = other DNA
tgctatctctgcatgagcaggg

SEQ ID NO: 5243 - DNA, 22 bp, Homo sapiens
  source 1..22: mol_type = other DNA
tactcaactctgctgctatagc

SEQ ID NO: 5244 - DNA, 23 bp, Homo sapiens
  source 1..23: mol_type = other DNA
cactcacccctgcatgccaaggc

SEQ ID NO: 5245 - DNA, 21 bp, Homo sapiens
  source 1..21: mol_type = other DNA
tacaccactacatgctcatgc

SEQ ID NO: 5246 - DNA, 22 bp, Homo sapiens
  source 1..22: mol_type = other DNA
tactatctctgcatgctctgtt

SEQ ID NO: 5247 - DNA, 22 bp, Homo sapiens
  source 1..22: mol_type = other DNA
cactcaccagtcatgctcaagg

SEQ ID NO: 5248 - DNA, 22 bp, Homo sapiens
  source 1..22: mol_type = other DNA
tacataccttacatactcatgg

SEQ ID NO: 5249 - DNA, 23 bp, Homo sapiens
  source 1..23: mol_type = other DNA
cagtcacctctgcatgtccgggt

SEQ ID NO: 5250 - DNA, 22 bp, Homo sapiens
  source 1..22: mol_type = other DNA
cattcacccagcatgctctggg

SEQ ID NO: 5251 - DNA, 21 bp, Homo sapiens
  source 1..21: mol_type = other DNA
taattatctgcatgctccagg

SEQ ID NO: 5252 - DNA, 23 bp, Homo sapiens
  source 1..23: mol_type = other DNA
tatttacctctgcctgctcagag

SEQ ID NO: 5253 - DNA, 23 bp, Homo sapiens
  source 1..23: mol_type = other DNA
tattcatctctgcatgctaagga

SEQ ID NO: 5254 - DNA, 23 bp, Homo sapiens
  source 1..23: mol_type = other DNA
tagctacctctgcatgtccaagg

SEQ ID NO: 5255 - DNA, 23 bp, Homo sapiens
  source 1..23: mol_type = other DNA
cccacatctctgcatgctcctgg

SEQ ID NO: 5256 - DNA, 23 bp, Homo sapiens
  source 1..23: mol_type = other DNA
ttccaaaccatgcatgctcaggg

SEQ ID NO: 5257 - DNA, 23 bp, Homo sapiens
  source 1..23: mol_type = other DNA
caaccacatctgcatgcttaggg

SEQ ID NO: 5258 - DNA, 22 bp, Homo sapiens
  source 1..22: mol_type = other DNA
tgctcaccctccatgcacaggg

SEQ ID NO: 5259 - DNA, 22 bp, Homo sapiens
  source 1..22: mol_type = other DNA
tccccacatctgatgctcatgg

SEQ ID NO: 5260 - DNA, 24 bp, Homo sapiens
  source 1..24: mol_type = other DNA
cactcacaatctgcatgctcaatg

SEQ ID NO: 5261 - DNA, 23 bp, Homo sapiens
  source 1..23: mol_type = other DNA
taattaccaaagcatgctctggg

SEQ ID NO: 5262 - DNA, 23 bp, Homo sapiens
  source 1..23: mol_type = other DNA
aaccccaccctgcatgcccaagg

SEQ ID NO: 5263 - DNA, 21 bp, Homo sapiens
  source 1..21: mol_type = other DNA
tcctcacttgcatgctcactg

SEQ ID NO: 5264 - DNA, 22 bp, Homo sapiens
  source 1..22: mol_type = other DNA
tactcagattgcatgctcacta

SEQ ID NO: 5265 - DNA, 23 bp, Homo sapiens
  source 1..23: mol_type = other DNA
tgcccacctctgcatcccaaagt

SEQ ID NO: 5266 - DNA, 23 bp, Homo sapiens
  source 1..23: mol_type = other DNA
ggttgacatctgcatgctcacag

SEQ ID NO: 5267 - DNA, 23 bp, Homo sapiens
  source 1..23: mol_type = other DNA
tgagcatatgtgcatgctcaagg

SEQ ID NO: 5268 - DNA, 23 bp, Homo sapiens
  source 1..23: mol_type = other DNA
atctcacctctccctgctcatgg

SEQ ID NO: 5269 - DNA, 23 bp, Homo sapiens
  source 1..23: mol_type = other DNA
ttcattcatctgcatgttcacgg

SEQ ID NO: 5270 - DNA, 23 bp, Homo sapiens
  source 1..23: mol_type = other DNA
cattcatgtatacatgctcaagg

SEQ ID NO: 5271 - DNA, 22 bp, Homo sapiens
  source 1..22: mol_type = other DNA
cgctcacctatgctgctcaagg

SEQ ID NO: 5272 - DNA, 23 bp, Homo sapiens
  source 1..23: mol_type = other DNA
taatcatctctgcatgagcagag

SEQ ID NO: 5273 - DNA, 22 bp, Homo sapiens
  source 1..22: mol_type = other DNA
tcctcgcactgcacgctcatgg

SEQ ID NO: 5274 - DNA, 23 bp, Homo sapiens
  source 1..23: mol_type = other DNA
ttctaacctctccttgctcctga

SEQ ID NO: 5275 - DNA, 22 bp, Homo sapiens
  source 1..22: mol_type = other DNA
ttccacctctgcctgctcgggc

SEQ ID NO: 5276 - DNA, 22 bp, Homo sapiens
  source 1..22: mol_type = other DNA
caccaacctctgctactcaagg

SEQ ID NO: 5277 - DNA, 23 bp, Homo sapiens
  source 1..23: mol_type = other DNA
tcctcatccctgcatgcataggg

SEQ ID NO: 5278 - DNA, 23 bp, Homo sapiens
  source 1..23: mol_type = other DNA
tacttaaagctacatgctcatga

SEQ ID NO: 5279 - DNA, 24 bp, Homo sapiens
  source 1..24: mol_type = other DNA
tgatcaccatcagcatgcccatgg

SEQ ID NO: 5280 - DNA, 23 bp, Homo sapiens
  source 1..23: mol_type = other DNA
aagccaccactgcatgttcatga

SEQ ID NO: 5281 - DNA, 23 bp, Homo sapiens
  source 1..23: mol_type = other DNA
taatcaccactgctttctcaaac

SEQ ID NO: 5282 - DNA, 23 bp, Homo sapiens
  source 1..23: mol_type = other DNA
tcctcaactcaacatgctcacct

SEQ ID NO: 5283 - DNA, 21 bp, Homo sapiens
  source 1..21: mol_type = other DNA
aactcaactgcatgttcaagg

SEQ ID NO: 5284 - DNA, 23 bp, Homo sapiens
  source 1..23: mol_type = other DNA
tactcaccactgtaagctcttta

SEQ ID NO: 5285 - DNA, 22 bp, Homo sapiens
  source 1..22: mol_type = other DNA
cactgtccctgcaggctcaggg

SEQ ID NO: 5286 - DNA, 23 bp, Homo sapiens
  source 1..23: mol_type = other DNA
taccatattctgcatgcacatgg

SEQ ID NO: 5287 - DNA, 21 bp, Homo sapiens
  source 1..21: mol_type = other DNA
tactcacctctcgtctcatgg

SEQ ID NO: 5288 - DNA, 23 bp, Homo sapiens
  source 1..23: mol_type = other DNA
cactcaacactctgtgctcaagg

SEQ ID NO: 5289 - DNA, 23 bp, Homo sapiens
  source 1..23: mol_type = other DNA
ttctaacctctgcatgggcaggg

SEQ ID NO: 5290 - DNA, 23 bp, Homo sapiens
  source 1..23: mol_type = other DNA
tgaacacctctgcatgctggggc

SEQ ID NO: 5291 - DNA, 23 bp, Homo sapiens
  source 1..23: mol_type = other DNA
tattctcctcagcaagctctttg

SEQ ID NO: 5292 - DNA, 24 bp, Homo sapiens
  source 1..24: mol_type = other DNA
cactcgcctactggaggctcaggg

SEQ ID NO: 5293 - DNA, 22 bp, Homo sapiens
  source 1..22: mol_type = other DNA
tgcttaactctgctgctctagg

SEQ ID NO: 5294 - DNA, 23 bp, Homo sapiens
  source 1..23: mol_type = other DNA
tgctcacctctgcctgccctagt

SEQ ID NO: 5295 - DNA, 23 bp, Homo sapiens
  source 1..23: mol_type = other DNA
tacccccctgtgcaagatcacga

SEQ ID NO: 5296 - DNA, 22 bp, Homo sapiens
  source 1..22: mol_type = other DNA
tactacctcggcatgctatagc

SEQ ID NO: 5297 - DNA, 23 bp, Homo sapiens
  source 1..23: mol_type = other DNA
cattcatctctgcatccctaagg

SEQ ID NO: 5298 - DNA, 24 bp, Homo sapiens
  source 1..24: mol_type = other DNA
cattcacctctgcttgtctcaggg

SEQ ID NO: 5299 - DNA, 22 bp, Homo sapiens
  source 1..22: mol_type = other DNA
gagtccctctgcatgctgctgg

SEQ ID NO: 5300 - DNA, 22 bp, Homo sapiens
  source 1..22: mol_type = other DNA
acctcacctcccatgctcaagg

SEQ ID NO: 5301 - DNA, 23 bp, Homo sapiens
  source 1..23: mol_type = other DNA
cacccacctctgcatgcacatgg

SEQ ID NO: 5302 - DNA, 22 bp, Homo sapiens
  source 1..22: mol_type = other DNA
tacacacccctgatgctcaagg

SEQ ID NO: 5303 - DNA, 23 bp, Homo sapiens
  source 1..23: mol_type = other DNA
cccttacctctgcatgcgcgtgg

SEQ ID NO: 5304 - DNA, 23 bp, Homo sapiens
  source 1..23: mol_type = other DNA
tggtcacctctgtatgctctggg

SEQ ID NO: 5305 - DNA, 22 bp, Homo sapiens
  source 1..22: mol_type = other DNA
cactaacctctgatgctcacag

SEQ ID NO: 5306 - DNA, 23 bp, Homo sapiens
  source 1..23: mol_type = other DNA
cactcacctctacagctccatgg

SEQ ID NO: 5307 - DNA, 22 bp, Homo sapiens
  source 1..22: mol_type = other DNA
tgcacaccttacatgctcacag

SEQ ID NO: 5308 - DNA, 22 bp, Homo sapiens
  source 1..22: mol_type = other DNA
aactcctactgcatgctcaaga

SEQ ID NO: 5309 - DNA, 24 bp, Homo sapiens
  source 1..24: mol_type = other DNA
cactcacctctacaacgctcatgg

SEQ ID NO: 5310 - DNA, 23 bp, Homo sapiens
  source 1..23: mol_type = other DNA
ctcccacctccacatgctcgggg

SEQ ID NO: 5311 - DNA, 24 bp, Homo sapiens
  source 1..24: mol_type = other DNA
tactcacccactgcacgcccaggg

SEQ ID NO: 5312 - DNA, 24 bp, Homo sapiens
  source 1..24: mol_type = other DNA
tcctccttcactgcatgctcaggg

SEQ ID NO: 5313 - DNA, 24 bp, Homo sapiens
  source 1..24: mol_type = other DNA
tgagcacctattgcatgctcatgg

SEQ ID NO: 5314 - DNA, 22 bp, Homo sapiens
  source 1..22: mol_type = other DNA
gacctccactgcatgctcaaag

SEQ ID NO: 5315 - DNA, 23 bp, Homo sapiens
  source 1..23: mol_type = other DNA
aactccacacagcatgctcttgg

SEQ ID NO: 5316 - DNA, 22 bp, Homo sapiens
  source 1..22: mol_type = other DNA
gactcatctctgatgcacaagg

SEQ ID NO: 5317 - DNA, 22 bp, Homo sapiens
  source 1..22: mol_type = other DNA
tattcactctgcaaactcatgg

SEQ ID NO: 5318 - DNA, 22 bp, Homo sapiens
  source 1..22: mol_type = other DNA
agctcatctctcatgctctagg

SEQ ID NO: 5319 - DNA, 23 bp, Homo sapiens
  source 1..23: mol_type = other DNA
atgtcacctctgctagctcagag

SEQ ID NO: 5320 - DNA, 23 bp, Homo sapiens
  source 1..23: mol_type = other DNA
catttgccactgcatgctcgtgg

SEQ ID NO: 5321 - DNA, 23 bp, Homo sapiens
  source 1..23: mol_type = other DNA
agcacaccactgcatgcccacag

SEQ ID NO: 5322 - DNA, 23 bp, Homo sapiens
  source 1..23: mol_type = other DNA
aactcacccctgcatccccaagg

SEQ ID NO: 5323 - DNA, 24 bp, Homo sapiens
  source 1..24: mol_type = other DNA
ttttcacctattgcatgttcaggg

SEQ ID NO: 5324 - DNA, 23 bp, Homo sapiens
  source 1..23: mol_type = other DNA
aatctgcatctgcatgctcaagg

SEQ ID NO: 5325 - DNA, 23 bp, Homo sapiens
  source 1..23: mol_type = other DNA
gacagacacatgcatgctcatgg

SEQ ID NO: 5326 - DNA, 22 bp, Homo sapiens
  source 1..22: mol_type = other DNA
aactcaccctgcatacttgggg

SEQ ID NO: 5327 - DNA, 23 bp, Homo sapiens
  source 1..23: mol_type = other DNA
tacatgcctatgcatgcgcatgg

SEQ ID NO: 5328 - DNA, 22 bp, Homo sapiens
  source 1..22: mol_type = other DNA
ctctcacctctgcctctcaaag

SEQ ID NO: 5329 - DNA, 24 bp, Homo sapiens
  source 1..24: mol_type = other DNA
tattcacctccacacagctcaggg

SEQ ID NO: 5330 - DNA, 21 bp, Homo sapiens
  source 1..21: mol_type = other DNA
tcctcacctctgtgctcaggg

SEQ ID NO: 5331 - DNA, 22 bp, Homo sapiens
  source 1..22: mol_type = other DNA
tgctcaccctgcaaactcagga

SEQ ID NO: 5332 - DNA, 22 bp, Homo sapiens
  source 1..22: mol_type = other DNA
tactcacctctcatcttcagga

SEQ ID NO: 5333 - DNA, 22 bp, Homo sapiens
  source 1..22: mol_type = other DNA
tgctcactcaacatgttcatgg

SEQ ID NO: 5334 - DNA, 23 bp, Homo sapiens
  source 1..23: mol_type = other DNA
aaagctcctctgcacgctcatgg

SEQ ID NO: 5335 - DNA, 23 bp, Homo sapiens
  source 1..23: mol_type = other DNA
ctgacacctttgcatgctcatga

SEQ ID NO: 5336 - DNA, 23 bp, Homo sapiens
  source 1..23: mol_type = other DNA
cacgcaaccctgcatgctcacag

SEQ ID NO: 5337 - DNA, 23 bp, Homo sapiens
  source 1..23: mol_type = other DNA
tatggggctctgcatgctcttgg

SEQ ID NO: 5338 - DNA, 24 bp, Homo sapiens
  source 1..24: mol_type = other DNA
tgcaaatcctctgcctgctcacgg

SEQ ID NO: 5339 - DNA, 22 bp, Homo sapiens
  source 1..22: mol_type = other DNA
gactcactcagcatgctctgga

SEQ ID NO: 5340 - DNA, 23 bp, Homo sapiens
  source 1..23: mol_type = other DNA
acctcccagctgcatgctcttgg

SEQ ID NO: 5341 - DNA, 22 bp, Homo sapiens
  source 1..22: mol_type = other DNA
gcctgaccactgctgctcaagg

SEQ ID NO: 5342 - DNA, 23 bp, Homo sapiens
  source 1..23: mol_type = other DNA
tcctcacctccccatactcaacg

SEQ ID NO: 5343 - DNA, 23 bp, Homo sapiens
  source 1..23: mol_type = other DNA
cactctcctcatcatgctgacag

SEQ ID NO: 5344 - DNA, 23 bp, Homo sapiens
  source 1..23: mol_type = other DNA
tccctacctctgcaggctcaggt

SEQ ID NO: 5345 - DNA, 21 bp, Homo sapiens
  source 1..21: mol_type = other DNA
tacccacccctgcactcaggg

SEQ ID NO: 5346 - DNA, 23 bp, Homo sapiens
  source 1..23: mol_type = other DNA
gagccgcctctgcttgctcgtgg

SEQ ID NO: 5347 - DNA, 23 bp, Homo sapiens
  source 1..23: mol_type = other DNA
ccctcaactctgcatgttaaggc

SEQ ID NO: 5348 - DNA, 23 bp, Homo sapiens
  source 1..23: mol_type = other DNA
tacatccctatgcctgctcatgg

SEQ ID NO: 5349 - DNA, 23 bp, Homo sapiens
  source 1..23: mol_type = other DNA
cacacacatctggaagctcctgg

SEQ ID NO: 5350 - DNA, 23 bp, Homo sapiens
  source 1..23: mol_type = other DNA
gactcaaagatccatgctcatgg

SEQ ID NO: 5351 - DNA, 24 bp, Homo sapiens
  source 1..24: mol_type = other DNA
tactcatcatctgcatggtcactc

SEQ ID NO: 5352 - DNA, 22 bp, Homo sapiens
  source 1..22: mol_type = other DNA
tcctcacactggatgctcatga

SEQ ID NO: 5353 - DNA, 22 bp, Homo sapiens
  source 1..22: mol_type = other DNA
taagaacctctgctgcacaggg

SEQ ID NO: 5354 - DNA, 22 bp, Homo sapiens
  source 1..22: mol_type = other DNA
cactcacctcggcctctcaaag

SEQ ID NO: 5355 - DNA, 23 bp, Homo sapiens
  source 1..23: mol_type = other DNA
tacatacatgtgaatgctcattg

SEQ ID NO: 5356 - DNA, 23 bp, Homo sapiens
  source 1..23: mol_type = other DNA
tactcacctccgcatcaccagct

SEQ ID NO: 5357 - DNA, 23 bp, Homo sapiens
  source 1..23: mol_type = other DNA
gacctacctatgcatgcatatgg

SEQ ID NO: 5358 - DNA, 22 bp, Homo sapiens
  source 1..22: mol_type = other DNA
tgcacactctgcatgctcacct

SEQ ID NO: 5359 - DNA, 23 bp, Homo sapiens
  source 1..23: mol_type = other DNA
tatttacctctccatgttccttg

SEQ ID NO: 5360 - DNA, 22 bp, Homo sapiens
  source 1..22: mol_type = other DNA
tactaaccttgccagctgaggg

SEQ ID NO: 5361 - DNA, 22 bp, Homo sapiens
  source 1..22: mol_type = other DNA
tgctcaccccacatgctcatgg

SEQ ID NO: 5362 - DNA, 22 bp, Homo sapiens
  source 1..22: mol_type = other DNA
ccttcacctctgcatctcaggg

SEQ ID NO: 5363 - DNA, 22 bp, Homo sapiens
  source 1..22: mol_type = other DNA
atctcaccctacaagctcaggg

SEQ ID NO: 5364 - DNA, 22 bp, Homo sapiens
  source 1..22: mol_type = other DNA
cacacacccagcatgttcaagg

SEQ ID NO: 5365 - DNA, 23 bp, Homo sapiens
  source 1..23: mol_type = other DNA
tactcaccactgtatgcccaatg

SEQ ID NO: 5366 - DNA, 23 bp, Homo sapiens
  source 1..23: mol_type = other DNA
tttgctacactgcatgctcatgg

SEQ ID NO: 5367 - DNA, 23 bp, Homo sapiens
  source 1..23: mol_type = other DNA
tgaaccccactgcatgctcttgg

SEQ ID NO: 5368 - DNA, 23 bp, Homo sapiens
  source 1..23: mol_type = other DNA
tatttacccatgcatgctcatgg

SEQ ID NO: 5369 - DNA, 22 bp, Homo sapiens
  source 1..22: mol_type = other DNA
tactcatactgcatgcacaggc

SEQ ID NO: 5370 - DNA, 22 bp, Homo sapiens
  source 1..22: mol_type = other DNA
gggtcacctctccatgtcaggg

SEQ ID NO: 5371 - DNA, 23 bp, Homo sapiens
  source 1..23: mol_type = other DNA
tcctcatctctgcatgctcaggt

SEQ ID NO: 5372 - DNA, 21 bp, Homo sapiens
  source 1..21: mol_type = other DNA
tatccatctgtatgctcatgg

SEQ ID NO: 5373 - DNA, 22 bp, Homo sapiens
  source 1..22: mol_type = other DNA
tactcgctctacatgctcagaa

SEQ ID NO: 5374 - DNA, 23 bp, Homo sapiens
  source 1..23: mol_type = other DNA
tcctcacctcagcatgtcaaagc

SEQ ID NO: 5375 - DNA, 21 bp, Homo sapiens
  source 1..21: mol_type = other DNA
tactcactggcatgctcaaag

SEQ ID NO: 5376 - DNA, 22 bp, Homo sapiens
  source 1..22: mol_type = other DNA
tgctcaccccgtatgctcatag

SEQ ID NO: 5377 - DNA, 21 bp, Homo sapiens
  source 1..21: mol_type = other DNA
tccttcactgcatgctcaggg

SEQ ID NO: 5378 - DNA, 24 bp, Homo sapiens
  source 1..24: mol_type = other DNA
cacacactccctgcatgctcacag

SEQ ID NO: 5379 - DNA, 23 bp, Homo sapiens
  source 1..23: mol_type = other DNA
atctttcctatgcatgctcagga

SEQ ID NO: 5380 - DNA, 23 bp, Homo sapiens
  source 1..23: mol_type = other DNA
aactcaccactacttgcacaggg

SEQ ID NO: 5381 - DNA, 22 bp, Homo sapiens
  source 1..22: mol_type = other DNA
tatttaatttgcatgctcaggg

SEQ ID NO: 5382 - DNA, 22 bp, Homo sapiens
  source 1..22: mol_type = other DNA
gcatcacatctgatgctcatgg

SEQ ID NO: 5383 - DNA, 22 bp, Homo sapiens
  source 1..22: mol_type = other DNA
cactcaccccgcatgcgcagag

SEQ ID NO: 5384 - DNA, 24 bp, Homo sapiens
  source 1..24: mol_type = other DNA
tcctctctcactgcatgctcagtg

SEQ ID NO: 5385 - DNA, 23 bp, Homo sapiens
  source 1..23: mol_type = other DNA
tataatgctctgcatgctcagag

SEQ ID NO: 5386 - DNA, 22 bp, Homo sapiens
  source 1..22: mol_type = other DNA
tagtccctaagcatgctcttgg

SEQ ID NO: 5387 - DNA, 23 bp, Homo sapiens
  source 1..23: mol_type = other DNA
ttcacagttctacatgctcaggg

SEQ ID NO: 5388 - DNA, 23 bp, Homo sapiens
  source 1..23: mol_type = other DNA
aactcacgtcagcttgctcttgg

SEQ ID NO: 5389 - DNA, 22 bp, Homo sapiens
  source 1..22: mol_type = other DNA
cacccactctgcaggctccggg

SEQ ID NO: 5390 - DNA, 23 bp, Homo sapiens
  source 1..23: mol_type = other DNA
ctaccacctatgcttgctcaagg

SEQ ID NO: 5391 - DNA, 23 bp, Homo sapiens
  source 1..23: mol_type = other DNA
tctgcatttctgcatgctccagg

SEQ ID NO: 5392 - DNA, 23 bp, Homo sapiens
  source 1..23: mol_type = other DNA
tggtcacttctccatgctcatgg

SEQ ID NO: 5393 - DNA, 22 bp, Homo sapiens
  source 1..22: mol_type = other DNA
acctcacctctgcagctaaggt

SEQ ID NO: 5394 - DNA, 22 bp, Homo sapiens
  source 1..22: mol_type = other DNA
tactctccccgtatgctcatag

SEQ ID NO: 5395 - DNA, 23 bp, Homo sapiens
  source 1..23: mol_type = other DNA
cccagacctctgcatgcagatgg

SEQ ID NO: 5396 - DNA, 22 bp, Homo sapiens
  source 1..22: mol_type = other DNA
catccacctctccagctcaagg

SEQ ID NO: 5397 - DNA, 22 bp, Homo sapiens
  source 1..22: mol_type = other DNA
aaatccatctgcatgctcattg

SEQ ID NO: 5398 - DNA, 22 bp, Homo sapiens
  source 1..22: mol_type = other DNA
tcttcacccctcatgctcagga

SEQ ID NO: 5399 - DNA, 22 bp, Homo sapiens
  source 1..22: mol_type = other DNA
ttctcaccactgcagcacatgg

SEQ ID NO: 5400 - DNA, 22 bp, Homo sapiens
  source 1..22: mol_type = other DNA
tactcaatccgcgtgcccatgg

SEQ ID NO: 5401 - DNA, 22 bp, Homo sapiens
  source 1..22: mol_type = other DNA
tagtcagcactgcatctcaagg

SEQ ID NO: 5402 - DNA, 23 bp, Homo sapiens
  source 1..23: mol_type = other DNA
ttttcacctctgcaggctcagaa

SEQ ID NO: 5403 - DNA, 21 bp, Homo sapiens
  source 1..21: mol_type = other DNA
ccctcacctctgcactctggg

SEQ ID NO: 5404 - DNA, 22 bp, Homo sapiens
  source 1..22: mol_type = other DNA
tactcatgactgatgctcaccg

SEQ ID NO: 5405 - DNA, 22 bp, Homo sapiens
  source 1..22: mol_type = other DNA
cacccacctctgcttctcaaag

SEQ ID NO: 5406 - DNA, 23 bp, Homo sapiens
  source 1..23: mol_type = other DNA
tacccacaagtgcaggctcaaga

SEQ ID NO: 5407 - DNA, 23 bp, Homo sapiens
  source 1..23: mol_type = other DNA
caattacctctgcatgttctttg

SEQ ID NO: 5408 - DNA, 23 bp, Homo sapiens
  source 1..23: mol_type = other DNA
ccccgaactctgcatcctcaggg

SEQ ID NO: 5409 - DNA, 23 bp, Homo sapiens
  source 1..23: mol_type = other DNA
caatcacctccccatcctcacga

SEQ ID NO: 5410 - DNA, 24 bp, Homo sapiens
  source 1..24: mol_type = other DNA
cactcacctgctgcatgaccctgg

SEQ ID NO: 5411 - DNA, 23 bp, Homo sapiens
  source 1..23: mol_type = other DNA
gtctcacctctgcctgttgaggg

SEQ ID NO: 5412 - DNA, 23 bp, Homo sapiens
  source 1..23: mol_type = other DNA
tactcacattggcctgctccctg

SEQ ID NO: 5413 - DNA, 23 bp, Homo sapiens
  source 1..23: mol_type = other DNA
tagtgacctgtacatgctcaaat

SEQ ID NO: 5414 - DNA, 24 bp, Homo sapiens
  source 1..24: mol_type = other DNA
tattcagcctctgcacgcaccggg

SEQ ID NO: 5415 - DNA, 22 bp, Homo sapiens
  source 1..22: mol_type = other DNA
taccacatctgcatgccccttg

SEQ ID NO: 5416 - DNA, 22 bp, Homo sapiens
  source 1..22: mol_type = other DNA
tactcacatctcatactcacat

SEQ ID NO: 5417 - DNA, 23 bp, Homo sapiens
  source 1..23: mol_type = other DNA
aacttacctctgcatcctgtgga

SEQ ID NO: 5418 - DNA, 23 bp, Homo sapiens
  source 1..23: mol_type = other DNA
ttctatactctccatggtcaggg

SEQ ID NO: 5419 - DNA, 23 bp, Homo sapiens
  source 1..23: mol_type = other DNA
ttctctcatctccaggctcagag

SEQ ID NO: 5420 - DNA, 23 bp, Homo sapiens
  source 1..23: mol_type = other DNA
gagtcaacactgcatgggcaggg

SEQ ID NO: 5421 - DNA, 25 bp, Homo sapiens
  source 1..25: mol_type = other DNA
tactcacctctcagcatactggagg

SEQ ID NO: 5422 - DNA, 22 bp, Homo sapiens
  source 1..22: mol_type = other DNA
tactcactcttcatgcttacct

SEQ ID NO: 5423 - DNA, 23 bp, Homo sapiens
  source 1..23: mol_type = other DNA
tgtgcacctctccatgtccaggg

SEQ ID NO: 5424 - DNA, 22 bp, Homo sapiens
  source 1..22: mol_type = other DNA
cactcaccactgcatcccacgg

SEQ ID NO: 5425 - DNA, 22 bp, Homo sapiens
  source 1..22: mol_type = other DNA
cactcacctcttcatctcaggg

SEQ ID NO: 5426 - DNA, 22 bp, Homo sapiens
  source 1..22: mol_type = other DNA
cactcacactacatgatcatgg

SEQ ID NO: 5427 - DNA, 22 bp, Homo sapiens
  source 1..22: mol_type = other DNA
tactcacctcttcatctcagga

SEQ ID NO: 5428 - DNA, 23 bp, Homo sapiens
  source 1..23: mol_type = other DNA
taatcacctctgcatggagaggg

SEQ ID NO: 5429 - DNA, 21 bp, Homo sapiens
  source 1..21: mol_type = other DNA
tacccacctccatgcccaggg

SEQ ID NO: 5430 - DNA, 23 bp, Homo sapiens
  source 1..23: mol_type = other DNA
aaaacatatctgcatgctcgtgg

SEQ ID NO: 5431 - DNA, 23 bp, Homo sapiens
  source 1..23: mol_type = other DNA
atctcagtactgcatgctcttgg

SEQ ID NO: 5432 - DNA, 22 bp, Homo sapiens
  source 1..22: mol_type = other DNA
ttctcaccttacttgctcaagg

SEQ ID NO: 5433 - DNA, 23 bp, Homo sapiens
  source 1..23: mol_type = other DNA
ggccctactctgcatgctcactg

SEQ ID NO: 5434 - DNA, 22 bp, Homo sapiens
  source 1..22: mol_type = other DNA
gactacatctgcatgctcagag

SEQ ID NO: 5435 - DNA, 22 bp, Homo sapiens
  source 1..22: mol_type = other DNA
tgagcacctctgcatctccagg

SEQ ID NO: 5436 - DNA, 22 bp, Homo sapiens
  source 1..22: mol_type = other DNA
ttctcacctctgctgttcatga

SEQ ID NO: 5437 - DNA, 22 bp, Homo sapiens
  source 1..22: mol_type = other DNA
tttttacctctgcatgtcctgg

SEQ ID NO: 5438 - DNA, 22 bp, Homo sapiens
  source 1..22: mol_type = other DNA
tcctcatcatgcatgctcagga

SEQ ID NO: 5439 - DNA, 22 bp, Homo sapiens
  source 1..22: mol_type = other DNA
tattccaactgcatgctcagag

SEQ ID NO: 5440 - DNA, 23 bp, Homo sapiens
  source 1..23: mol_type = other DNA
tggtgacctctgcatgctcaaga

SEQ ID NO: 5441 - DNA, 23 bp, Homo sapiens
  source 1..23: mol_type = other DNA
ggcccacatctgcaagctcatgg

SEQ ID NO: 5442 - DNA, 23 bp, Homo sapiens
  source 1..23: mol_type = other DNA
caggaacctctgcatgcactagg

SEQ ID NO: 5443 - DNA, 23 bp, Homo sapiens
  source 1..23: mol_type = other DNA
tgctcctctactcatgctcaggg

SEQ ID NO: 5444 - DNA, 22 bp, Homo sapiens
  source 1..22: mol_type = other DNA
cattccatctgcatgttcatgg

SEQ ID NO: 5445 - DNA, 22 bp, Homo sapiens
  source 1..22: mol_type = other DNA
tactcacccctgctgctcttaa

SEQ ID NO: 5446 - DNA, 22 bp, Homo sapiens
  source 1..22: mol_type = other DNA
tactttcactgcacgctcatgg

SEQ ID NO: 5447 - DNA, 23 bp, Homo sapiens
  source 1..23: mol_type = other DNA
aacacacccctgcatgctccaga

SEQ ID NO: 5448 - DNA, 23 bp, Homo sapiens
  source 1..23: mol_type = other DNA
aaatttcctctgcatgcacaagg

SEQ ID NO: 5449 - DNA, 22 bp, Homo sapiens
  source 1..22: mol_type = other DNA
tacaaacatctcatgctcatgg

SEQ ID NO: 5450 - DNA, 21 bp, Homo sapiens
  source 1..21: mol_type = other DNA
tactcagctgcatactcagag

SEQ ID NO: 5451 - DNA, 23 bp, Homo sapiens
  source 1..23: mol_type = other DNA
tccactcctcagcatgcccatgg

SEQ ID NO: 5452 - DNA, 22 bp, Homo sapiens
  source 1..22: mol_type = other DNA
tatgccctcaccatgctcatgg

SEQ ID NO: 5453 - DNA, 23 bp, Homo sapiens
  source 1..23: mol_type = other DNA
tactcacccacacatgcctatgg

SEQ ID NO: 5454 - DNA, 23 bp, Homo sapiens
  source 1..23: mol_type = other DNA
tacgcacatctctatgctcagat

SEQ ID NO: 5455 - DNA, 23 bp, Homo sapiens
  source 1..23: mol_type = other DNA
tgcccacctttgcttgcccaaga

SEQ ID NO: 5456 - DNA, 23 bp, Homo sapiens
  source 1..23: mol_type = other DNA
tactctaatctacatgcttagga

SEQ ID NO: 5457 - DNA, 23 bp, Homo sapiens
  source 1..23: mol_type = other DNA
atttcaccattgcatgctcatgt

SEQ ID NO: 5458 - DNA, 22 bp, Homo sapiens
  source 1..22: mol_type = other DNA
ctctcacctctgcgtctcaaag

SEQ ID NO: 5459 - DNA, 24 bp, Homo sapiens
  source 1..24: mol_type = other DNA
tactcgacctctgcatgctccagc

SEQ ID NO: 5460 - DNA, 23 bp, Homo sapiens
  source 1..23: mol_type = other DNA
tcctcacctcagaatgctccact

SEQ ID NO: 5461 - DNA, 23 bp, Homo sapiens
  source 1..23: mol_type = other DNA
ttctcaccgctgcatgtttactg

SEQ ID NO: 5462 - DNA, 24 bp, Homo sapiens
  source 1..24: mol_type = other DNA
gacagacctacttcatgctcaagg

SEQ ID NO: 5463 - DNA, 23 bp, Homo sapiens
  source 1..23: mol_type = other DNA
cactcacataggcatgcacagag

SEQ ID NO: 5464 - DNA, 23 bp, Homo sapiens
  source 1..23: mol_type = other DNA
ggctcgcctaagcatgcccatgg

SEQ ID NO: 5465 - DNA, 23 bp, Homo sapiens
  source 1..23: mol_type = other DNA
taaacaacacagcctgctcaggg

SEQ ID NO: 5466 - DNA, 23 bp, Homo sapiens
  source 1..23: mol_type = other DNA
tactcacttctacatgtttgaag

SEQ ID NO: 5467 - DNA, 23 bp, Homo sapiens
  source 1..23: mol_type = other DNA
tgctcagcactgcatgctgagaa

SEQ ID NO: 5468 - DNA, 24 bp, Homo sapiens
  source 1..24: mol_type = other DNA
taagcacctactgaatgctcaggg

SEQ ID NO: 5469 - DNA, 24 bp, Homo sapiens
  source 1..24: mol_type = other DNA
tgcttacctctaacatgctcagga

SEQ ID NO: 5470 - DNA, 23 bp, Homo sapiens
  source 1..23: mol_type = other DNA
cactcactggaccatgctcaagg

SEQ ID NO: 5471 - DNA, 23 bp, Homo sapiens
  source 1..23: mol_type = other DNA
tactcactcccccattctcatgc

SEQ ID NO: 5472 - DNA, 21 bp, Homo sapiens
  source 1..21: mol_type = other DNA
ttatcacctctgctctcaggg

SEQ ID NO: 5473 - DNA, 23 bp, Homo sapiens
  source 1..23: mol_type = other DNA
ttttctactctgcataatcatgg

SEQ ID NO: 5474 - DNA, 23 bp, Homo sapiens
  source 1..23: mol_type = other DNA
acctcacctctgcctgctctggg

SEQ ID NO: 5475 - DNA, 23 bp, Homo sapiens
  source 1..23: mol_type = other DNA
cactcacctctccatctccaggt

SEQ ID NO: 5476 - DNA, 23 bp, Homo sapiens
  source 1..23: mol_type = other DNA
tcctcacctctgcattcaacggc

SEQ ID NO: 5477 - DNA, 23 bp, Homo sapiens
  source 1..23: mol_type = other DNA
gacccacctctacatgctcaggt

SEQ ID NO: 5478 - DNA, 22 bp, Homo sapiens
  source 1..22: mol_type = other DNA
gaattacctcccatgctcaggg

SEQ ID NO: 5479 - DNA, 22 bp, Homo sapiens
  source 1..22: mol_type = other DNA
gactcacatctcatgcccatgg

SEQ ID NO: 5480 - DNA, 23 bp, Homo sapiens
  source 1..23: mol_type = other DNA
aaatcacctctgcacgctcctgg

SEQ ID NO: 5481 - DNA, 22 bp, Homo sapiens
  source 1..22: mol_type = other DNA
ctctcacctctcatgctaaatg

SEQ ID NO: 5482 - DNA, 23 bp, Homo sapiens
  source 1..23: mol_type = other DNA
atcccacatctacatgctcttgg

SEQ ID NO: 5483 - DNA, 21 bp, Homo sapiens
  source 1..21: mol_type = other DNA
gactcctatgcatgcttaagg

SEQ ID NO: 5484 - DNA, 22 bp, Homo sapiens
  source 1..22: mol_type = other DNA
ttatcacctcttcatctcttgg

SEQ ID NO: 5485 - DNA, 23 bp, Homo sapiens
  source 1..23: mol_type = other DNA
tcaccaccccaacatgctcaggg

SEQ ID NO: 5486 - DNA, 23 bp, Homo sapiens
  source 1..23: mol_type = other DNA
gcgccacctctgcatggtcatgg

SEQ ID NO: 5487 - DNA, 23 bp, Homo sapiens
  source 1..23: mol_type = other DNA
cacacacacatgcatgcacatgg

SEQ ID NO: 5488 - DNA, 22 bp, Homo sapiens
  source 1..22: mol_type = other DNA
ctgtcacctctgcatgacatgg

SEQ ID NO: 5489 - DNA, 22 bp, Homo sapiens
  source 1..22: mol_type = other DNA
gacgcagtctgcatgctcgtgg

SEQ ID NO: 5490 - DNA, 23 bp, Homo sapiens
  source 1..23: mol_type = other DNA
gacacactgatgcatgctcacag

SEQ ID NO: 5491 - DNA, 23 bp, Homo sapiens
  source 1..23: mol_type = other DNA
ttgttaccactgcatgccctggg

SEQ ID NO: 5492 - DNA, 22 bp, Homo sapiens
  source 1..22: mol_type = other DNA
ctctcacctccgcatctcaagt

SEQ ID NO: 5493 - DNA, 22 bp, Homo sapiens
  source 1..22: mol_type = other DNA
ttcaccccctgcatgctcaaag

SEQ ID NO: 5494 - DNA, 23 bp, Homo sapiens
  source 1..23: mol_type = other DNA
cccgcacccatgcatgctccagg

SEQ ID NO: 5495 - DNA, 23 bp, Homo sapiens
  source 1..23: mol_type = other DNA
atcaaacctctgcatggtcaagg

SEQ ID NO: 5496 - DNA, 22 bp, Homo sapiens
  source 1..22: mol_type = other DNA
tagccacatctgcatctccagg

SEQ ID NO: 5497 - DNA, 22 bp, Homo sapiens
  source 1..22: mol_type = other DNA
ttcttccactgcatgcccaagg

SEQ ID NO: 5498 - DNA, 22 bp, Homo sapiens
  source 1..22: mol_type = other DNA
gcctcacctctcatgctttagg

SEQ ID NO: 5499 - DNA, 23 bp, Homo sapiens
  source 1..23: mol_type = other DNA
tgcacacctgcgcatgctcagtg

SEQ ID NO: 5500 - DNA, 21 bp, Homo sapiens
  source 1..21: mol_type = other DNA
tgctcacccccatgctccggg

SEQ ID NO: 5501 - DNA, 23 bp, Homo sapiens
  source 1..23: mol_type = other DNA
tgttcacctctgtatgtccatgt

SEQ ID NO: 5502 - DNA, 23 bp, Homo sapiens
  source 1..23: mol_type = other DNA
tactccaatatgcatgctcatgc

SEQ ID NO: 5503 - DNA, 23 bp, Homo sapiens
  source 1..23: mol_type = other DNA
tacttacacttgcatgctcagca

SEQ ID NO: 5504 - DNA, 23 bp, Homo sapiens
  source 1..23: mol_type = other DNA
acctcatcactgcatgcccctgg

SEQ ID NO: 5505 - DNA, 23 bp, Homo sapiens
  source 1..23: mol_type = other DNA
ttcacacatgtgcatgctcacac

SEQ ID NO: 5506 - DNA, 23 bp, Homo sapiens
  source 1..23: mol_type = other DNA
aacacacatgtgcatgcacatgg

SEQ ID NO: 5507 - DNA, 23 bp, Homo sapiens
  source 1..23: mol_type = other DNA
taaagatatctgcatgctcatgt

SEQ ID NO: 5508 - DNA, 22 bp, Homo sapiens
  source 1..22: mol_type = other DNA
aacccacctctactactcacgg

SEQ ID NO: 5509 - DNA, 21 bp, Homo sapiens
  source 1..21: mol_type = other DNA
aactcatttgcatgctcaaag

SEQ ID NO: 5510 - DNA, 23 bp, Homo sapiens
  source 1..23: mol_type = other DNA
ctcacactcctgcatgcccaagg

SEQ ID NO: 5511 - DNA, 24 bp, Homo sapiens
  source 1..24: mol_type = other DNA
tacccaccttctgcctgctcaggg

SEQ ID NO: 5512 - DNA, 22 bp, Homo sapiens
  source 1..22: mol_type = other DNA
aaatctcccctgctgctcatgg

SEQ ID NO: 5513 - DNA, 21 bp, Homo sapiens
  source 1..21: mol_type = other DNA
tactcacctgtgtgctcacct

SEQ ID NO: 5514 - DNA, 21 bp, Homo sapiens
  source 1..21: mol_type = other DNA
tactcatctgtaagcgcaggg

SEQ ID NO: 5515 - DNA, 22 bp, Homo sapiens
  source 1..22: mol_type = other DNA
aactcaggctgcatcctcaagg

SEQ ID NO: 5516 - DNA, 23 bp, Homo sapiens
  source 1..23: mol_type = other DNA
tactcccctctgcatcctgagtt

SEQ ID NO: 5517 - DNA, 23 bp, Homo sapiens
  source 1..23: mol_type = other DNA
tggtcacctctgcacgctattgg

SEQ ID NO: 5518 - DNA, 23 bp, Homo sapiens
  source 1..23: mol_type = other DNA
tactcactactgcatccactgtg

SEQ ID NO: 5519 - DNA, 24 bp, Homo sapiens
  source 1..24: mol_type = other DNA
tactcacctcagcatctatcaagg

SEQ ID NO: 5520 - DNA, 23 bp, Homo sapiens
  source 1..23: mol_type = other DNA
acctcacctttgcctgcacatgg

SEQ ID NO: 5521 - DNA, 23 bp, Homo sapiens
  source 1..23: mol_type = other DNA
cattcacctctgcatggctaggg

SEQ ID NO: 5522 - DNA, 23 bp, Homo sapiens
  source 1..23: mol_type = other DNA
tactcacactctcatgttcatgg

SEQ ID NO: 5523 - DNA, 22 bp, Homo sapiens
  source 1..22: mol_type = other DNA
tactcattcagcatgctctgag

SEQ ID NO: 5524 - DNA, 23 bp, Homo sapiens
  source 1..23: mol_type = other DNA
ctattacctctgcatgctcagtg

SEQ ID NO: 5525 - DNA, 22 bp, Homo sapiens
  source 1..22: mol_type = other DNA
gtctcacccaacatgctcaagg

SEQ ID NO: 5526 - DNA, 23 bp, Homo sapiens
  source 1..23: mol_type = other DNA
tacacacctcttcatgcacatgg

SEQ ID NO: 5527 - DNA, 23 bp, Homo sapiens
  source 1..23: mol_type = other DNA
tactcacttctacatgctgaagg

SEQ ID NO: 5528 - DNA, 22 bp, Homo sapiens
  source 1..22: mol_type = other DNA
acaacacctctgcatgccaggg

SEQ ID NO: 5529 - DNA, 23 bp, Homo sapiens
  source 1..23: mol_type = other DNA
cactcacctctacatgctggagg

SEQ ID NO: 5530 - DNA, 21 bp, Homo sapiens
  source 1..21: mol_type = other DNA
aactcacctgtatgctccagg

SEQ ID NO: 5531 - DNA, 22 bp, Homo sapiens
  source 1..22: mol_type = other DNA
gaaacacattgcatgctcatgg

SEQ ID NO: 5532 - DNA, 23 bp, Homo sapiens
  source 1..23: mol_type = other DNA
ctctcaccactgcatgcactctg

SEQ ID NO: 5533 - DNA, 23 bp, Homo sapiens
  source 1..23: mol_type = other DNA
gggctacctctgcatggtcatgg

SEQ ID NO: 5534 - DNA, 22 bp, Homo sapiens
  source 1..22: mol_type = other DNA
gtcgcacctctgcatctcatga

SEQ ID NO: 5535 - DNA, 23 bp, Homo sapiens
  source 1..23: mol_type = other DNA
tcctcacctctgcatgatccaca

SEQ ID NO: 5536 - DNA, 22 bp, Homo sapiens
  source 1..22: mol_type = other DNA
ctcccacctctgctgctcgtgg

SEQ ID NO: 5537 - DNA, 22 bp, Homo sapiens
  source 1..22: mol_type = other DNA
agcttatcctgcatgctcatgg

SEQ ID NO: 5538 - DNA, 23 bp, Homo sapiens
  source 1..23: mol_type = other DNA
tactcatttatacatgctcactg

SEQ ID NO: 5539 - DNA, 22 bp, Homo sapiens
  source 1..22: mol_type = other DNA
taatatatctgcatgcccaagg

SEQ ID NO: 5540 - DNA, 22 bp, Homo sapiens
  source 1..22: mol_type = other DNA
agctcacttctgctgctcagag

SEQ ID NO: 5541 - DNA, 22 bp, Homo sapiens
  source 1..22: mol_type = other DNA
tcctcatctctccatctcaggg

SEQ ID NO: 5542 - DNA, 22 bp, Homo sapiens
  source 1..22: mol_type = other DNA
taattatcttgcatgttcaggg

SEQ ID NO: 5543 - DNA, 24 bp, Homo sapiens
  source 1..24: mol_type = other DNA
tactcaacactgcatgcatctcag

SEQ ID NO: 5544 - DNA, 22 bp, Homo sapiens
  source 1..22: mol_type = other DNA
ttaggaccctgcatgctcacgg

SEQ ID NO: 5545 - DNA, 22 bp, Homo sapiens
  source 1..22: mol_type = other DNA
cacaccctctgcatgcacttgg

SEQ ID NO: 5546 - DNA, 23 bp, Homo sapiens
  source 1..23: mol_type = other DNA
accacacctctgcaagctcctgg

SEQ ID NO: 5547 - DNA, 23 bp, Homo sapiens
  source 1..23: mol_type = other DNA
tgatggccactgcatgctctagg

SEQ ID NO: 5548 - DNA, 22 bp, Homo sapiens
  source 1..22: mol_type = other DNA
gtcccacctctgcatgcctggg

SEQ ID NO: 5549 - DNA, 22 bp, Homo sapiens
  source 1..22: mol_type = other DNA
ttctccactctgcatctcacag

SEQ ID NO: 5550 - DNA, 22 bp, Homo sapiens
  source 1..22: mol_type = other DNA
tactaaccctggatgcccaggg

SEQ ID NO: 5551 - DNA, 22 bp, Homo sapiens
  source 1..22: mol_type = other DNA
tactcacctctgctgcagtggt

SEQ ID NO: 5552 - DNA, 23 bp, Homo sapiens
  source 1..23: mol_type = other DNA
ctgtcacatctgcatgcacacag

SEQ ID NO: 5553 - DNA, 23 bp, Homo sapiens
  source 1..23: mol_type = other DNA
cccttacctctacatgctcagtc

SEQ ID NO: 5554 - DNA, 23 bp, Homo sapiens
  source 1..23: mol_type = other DNA
aactaaccacctcatgctcatgg

SEQ ID NO: 5555 - DNA, 22 bp, Homo sapiens
  source 1..22: mol_type = other DNA
cactcagtctgcatgcccttgg

SEQ ID NO: 5556 - DNA, 23 bp, Homo sapiens
  source 1..23: mol_type = other DNA
aactaatgcatgcatgctcatgg

SEQ ID NO: 5557 - DNA, 23 bp, Homo sapiens
  source 1..23: mol_type = other DNA
atcccacatatgcatgctcaaga

SEQ ID NO: 5558 - DNA, 23 bp, Homo sapiens
  source 1..23: mol_type = other DNA
cactgtcctatgcatgctctcag

SEQ ID NO: 5559 - DNA, 23 bp, Homo sapiens
  source 1..23: mol_type = other DNA
cactcacctcttccaactcaggg

SEQ ID NO: 5560 - DNA, 22 bp, Homo sapiens
  source 1..22: mol_type = other DNA
aactcacctggcatgcacacgt

SEQ ID NO: 5561 - DNA, 23 bp, Homo sapiens
  source 1..23: mol_type = other DNA
tacacacatcttcacgctcttgt

SEQ ID NO: 5562 - DNA, 23 bp, Homo sapiens
  source 1..23: mol_type = other DNA
taatcacctttgcatgctccgtg

SEQ ID NO: 5563 - DNA, 23 bp, Homo sapiens
  source 1..23: mol_type = other DNA
tgctcacctctgcctcccaaggt

SEQ ID NO: 5564 - DNA, 23 bp, Homo sapiens
  source 1..23: mol_type = other DNA
tactcacatgtacatgcacaaac

SEQ ID NO: 5565 - DNA, 21 bp, Homo sapiens
  source 1..21: mol_type = other DNA
gattcacctctgtgctcatgg

SEQ ID NO: 5566 - DNA, 23 bp, Homo sapiens
  source 1..23: mol_type = other DNA
tcatgagctatgcatgctcacag

SEQ ID NO: 5567 - DNA, 24 bp, Homo sapiens
  source 1..24: mol_type = other DNA
cactcacatctggcattctctggg

SEQ ID NO: 5568 - DNA, 22 bp, Homo sapiens
  source 1..22: mol_type = other DNA
taatcacctctgcatccctggt

SEQ ID NO: 5569 - DNA, 23 bp, Homo sapiens
  source 1..23: mol_type = other DNA
gactcactgctgcattctcagca

SEQ ID NO: 5570 - DNA, 23 bp, Homo sapiens
  source 1..23: mol_type = other DNA
ctctccccaccgcatgatcatgg

SEQ ID NO: 5571 - DNA, 22 bp, Homo sapiens
  source 1..22: mol_type = other DNA
cactcacagctgctgctctggg

SEQ ID NO: 5572 - DNA, 23 bp, Homo sapiens
  source 1..23: mol_type = other DNA
cattgacctctgcctgctcacct

SEQ ID NO: 5573 - DNA, 23 bp, Homo sapiens
  source 1..23: mol_type = other DNA
tactcaccgcaacatgattcagg

SEQ ID NO: 5574 - DNA, 23 bp, Homo sapiens
  source 1..23: mol_type = other DNA
cactcaccaatgcatgctgcatg

SEQ ID NO: 5575 - DNA, 23 bp, Homo sapiens
  source 1..23: mol_type = other DNA
cagtcacatatgtatgcttacgg

SEQ ID NO: 5576 - DNA, 24 bp, Homo sapiens
  source 1..24: mol_type = other DNA
taatcatcttctgcatgttcagag

SEQ ID NO: 5577 - DNA, 22 bp, Homo sapiens
  source 1..22: mol_type = other DNA
ttctacctctgcctgctcctgc

SEQ ID NO: 5578 - DNA, 22 bp, Homo sapiens
  source 1..22: mol_type = other DNA
tcttcacctctgcagctctaag

SEQ ID NO: 5579 - DNA, 22 bp, Homo sapiens
  source 1..22: mol_type = other DNA
aactcacctctgcgtctcaggc

SEQ ID NO: 5580 - DNA, 21 bp, Homo sapiens
  source 1..21: mol_type = other DNA
tactcaactgcattctcaggg

SEQ ID NO: 5581 - DNA, 22 bp, Homo sapiens
  source 1..22: mol_type = other DNA
cactcacactacatgctcttgg

SEQ ID NO: 5582 - DNA, 23 bp, Homo sapiens
  source 1..23: mol_type = other DNA
tacttacctctgcttgctcatag

SEQ ID NO: 5583 - DNA, 22 bp, Homo sapiens
  source 1..22: mol_type = other DNA
cactcattctgcatgcacaagg

SEQ ID NO: 5584 - DNA, 23 bp, Homo sapiens
  source 1..23: mol_type = other DNA
tactcatcctctcatgctaaggg

SEQ ID NO: 5585 - DNA, 22 bp, Homo sapiens
  source 1..22: mol_type = other DNA
tactcacctgacatactcagag

SEQ ID NO: 5586 - DNA, 23 bp, Homo sapiens
  source 1..23: mol_type = other DNA
tttgtacctctgcatgctcagat

SEQ ID NO: 5587 - DNA, 23 bp, Homo sapiens
  source 1..23: mol_type = other DNA
ttctcacctttgcatgccctggg

SEQ ID NO: 5588 - DNA, 22 bp, Homo sapiens
  source 1..22: mol_type = other DNA
tataacctctacatacacatgg

SEQ ID NO: 5589 - DNA, 22 bp, Homo sapiens
  source 1..22: mol_type = other DNA
tactccctctgaatgctctagg

SEQ ID NO: 5590 - DNA, 24 bp, Homo sapiens
  source 1..24: mol_type = other DNA
tactcacattctacatgtccaggg

SEQ ID NO: 5591 - DNA, 23 bp, Homo sapiens
  source 1..23: mol_type = other DNA
ctgtcacctctgcatgctgatag

SEQ ID NO: 5592 - DNA, 22 bp, Homo sapiens
  source 1..22: mol_type = other DNA
acatcacctctgcaggccaggg

SEQ ID NO: 5593 - DNA, 23 bp, Homo sapiens
  source 1..23: mol_type = other DNA
ttacaacctatgcatgatcaggg

SEQ ID NO: 5594 - DNA, 21 bp, Homo sapiens
  source 1..21: mol_type = other DNA
tgttcatctgtatgctcacgg

SEQ ID NO: 5595 - DNA, 23 bp, Homo sapiens
  source 1..23: mol_type = other DNA
ggcacacctctgcatgttcaata

SEQ ID NO: 5596 - DNA, 22 bp, Homo sapiens
  source 1..22: mol_type = other DNA
ttctcactcaacatgttcaggg

SEQ ID NO: 5597 - DNA, 24 bp, Homo sapiens
  source 1..24: mol_type = other DNA
cagacaccagctgcatgctcaagg

SEQ ID NO: 5598 - DNA, 22 bp, Homo sapiens
  source 1..22: mol_type = other DNA
cactccctctgaaggctccagg

SEQ ID NO: 5599 - DNA, 23 bp, Homo sapiens
  source 1..23: mol_type = other DNA
taggtgagtctgcatgctcaggg

SEQ ID NO: 5600 - DNA, 23 bp, Homo sapiens
  source 1..23: mol_type = other DNA
cactttcatctgcatactccagg

SEQ ID NO: 5601 - DNA, 22 bp, Homo sapiens
  source 1..22: mol_type = other DNA
tatttcctctggatgctcagag

SEQ ID NO: 5602 - DNA, 23 bp, Homo sapiens
  source 1..23: mol_type = other DNA
tactgcagactgcatactcaggg

SEQ ID NO: 5603 - DNA, 23 bp, Homo sapiens
  source 1..23: mol_type = other DNA
aactgacagctgaatgctcatga

SEQ ID NO: 5604 - DNA, 22 bp, Homo sapiens
  source 1..22: mol_type = other DNA
tactcacaccgcatgctcctgc

SEQ ID NO: 5605 - DNA, 22 bp, Homo sapiens
  source 1..22: mol_type = other DNA
taattacctagcatgctcaatg

SEQ ID NO: 5606 - DNA, 21 bp, Homo sapiens
  source 1..21: mol_type = other DNA
cactcacctgcatgctccccg

SEQ ID NO: 5607 - DNA, 23 bp, Homo sapiens
  source 1..23: mol_type = other DNA
tacacacatatgcatgctcacac

SEQ ID NO: 5608 - DNA, 23 bp, Homo sapiens
  source 1..23: mol_type = other DNA
tacttacctctcctagctctagg

SEQ ID NO: 5609 - DNA, 23 bp, Homo sapiens
  source 1..23: mol_type = other DNA
tcctcagctctgcaggagccagg

SEQ ID NO: 5610 - DNA, 23 bp, Homo sapiens
  source 1..23: mol_type = other DNA
ccctcacctctgcctgtcccggg

SEQ ID NO: 5611 - DNA, 23 bp, Homo sapiens
  source 1..23: mol_type = other DNA
tactcaccagtgcagtcccaggt

SEQ ID NO: 5612 - DNA, 23 bp, Homo sapiens
  source 1..23: mol_type = other DNA
tattatccttttcatgttcatgg

SEQ ID NO: 5613 - DNA, 23 bp, Homo sapiens
  source 1..23: mol_type = other DNA
tagtgacgtctgcttgttgaggg

SEQ ID NO: 5614 - DNA, 23 bp, Homo sapiens
  source 1..23: mol_type = other DNA
gactcacccttgcaggcttttgg

SEQ ID NO: 5615 - DNA, 23 bp, Homo sapiens
  source 1..23: mol_type = other DNA
tacacacctctacatgctcatga

SEQ ID NO: 5616 - DNA, 22 bp, Homo sapiens
  source 1..22: mol_type = other DNA
cactcactacacatgctcacgg

SEQ ID NO: 5617 - DNA, 22 bp, Homo sapiens
  source 1..22: mol_type = other DNA
aactcacgctgcatgcacatgg

SEQ ID NO: 5618 - DNA, 22 bp, Homo sapiens
  source 1..22: mol_type = other DNA
tagtcacctccgcatctctagg

SEQ ID NO: 5619 - DNA, 22 bp, Homo sapiens
  source 1..22: mol_type = other DNA
cgctcactctacatgcccacgg

SEQ ID NO: 5620 - DNA, 22 bp, Homo sapiens
  source 1..22: mol_type = other DNA
acctcacctctccatctctggg

SEQ ID NO: 5621 - DNA, 22 bp, Homo sapiens
  source 1..22: mol_type = other DNA
ttcacaccactgcatcccacgg

SEQ ID NO: 5622 - DNA, 23 bp, Homo sapiens
  source 1..23: mol_type = other DNA
gacacaccactgcaagctcaggg

SEQ ID NO: 5623 - DNA, 22 bp, Homo sapiens
  source 1..22: mol_type = other DNA
tactcaccctgtatgttcaatg

SEQ ID NO: 5624 - DNA, 22 bp, Homo sapiens
  source 1..22: mol_type = other DNA
taatcactccacatgctcgcgg

SEQ ID NO: 5625 - DNA, 23 bp, Homo sapiens
  source 1..23: mol_type = other DNA
acatcacccctgcattctcacgg

SEQ ID NO: 5626 - DNA, 23 bp, Homo sapiens
  source 1..23: mol_type = other DNA
atctatcccctgcatgctcatga

SEQ ID NO: 5627 - DNA, 22 bp, Homo sapiens
  source 1..22: mol_type = other DNA
cactcacccctccagctcaggg

SEQ ID NO: 5628 - DNA, 24 bp, Homo sapiens
  source 1..24: mol_type = other DNA
cactcactcactccatactcatgg

SEQ ID NO: 5629 - DNA, 23 bp, Homo sapiens
  source 1..23: mol_type = other DNA
accccaactctgcatgctctgag

SEQ ID NO: 5630 - DNA, 23 bp, Homo sapiens
  source 1..23: mol_type = other DNA
tgataacctctgcaagctcaaag

SEQ ID NO: 5631 - DNA, 22 bp, Homo sapiens
  source 1..22: mol_type = other DNA
cactccatctgcatgttcgtgg

SEQ ID NO: 5632 - DNA, 23 bp, Homo sapiens
  source 1..23: mol_type = other DNA
agtccacttctgcaggctcaggg

SEQ ID NO: 5633 - DNA, 23 bp, Homo sapiens
  source 1..23: mol_type = other DNA
atctcacctctccatgctcactg

SEQ ID NO: 5634 - DNA, 23 bp, Homo sapiens
  source 1..23: mol_type = other DNA
caggtacctctgcctgctccagg

SEQ ID NO: 5635 - DNA, 23 bp, Homo sapiens
  source 1..23: mol_type = other DNA
tgatcctctctgcatgctccatg

SEQ ID NO: 5636 - DNA, 22 bp, Homo sapiens
  source 1..22: mol_type = other DNA
aacacagctctgctgctcaggg

SEQ ID NO: 5637 - DNA, 23 bp, Homo sapiens
  source 1..23: mol_type = other DNA
tactcacctctgcatcctgagcc

SEQ ID NO: 5638 - DNA, 23 bp, Homo sapiens
  source 1..23: mol_type = other DNA
taaccacatctgcacactcactg

SEQ ID NO: 5639 - DNA, 23 bp, Homo sapiens
  source 1..23: mol_type = other DNA
tatccacatctgcatactccatg

SEQ ID NO: 5640 - DNA, 23 bp, Homo sapiens
  source 1..23: mol_type = other DNA
tactcatctctgcatggtctagt

SEQ ID NO: 5641 - DNA, 23 bp, Homo sapiens
  source 1..23: mol_type = other DNA
tcctctctactgtatggtcatgg

SEQ ID NO: 5642 - DNA, 22 bp, Homo sapiens
  source 1..22: mol_type = other DNA
ttttcactctgaatgctccagg

SEQ ID NO: 5643 - DNA, 22 bp, Homo sapiens
  source 1..22: mol_type = other DNA
gcctcacctcagcatcacacgg

SEQ ID NO: 5644 - DNA, 23 bp, Homo sapiens
  source 1..23: mol_type = other DNA
gacacatcttttcatgctcatgt

SEQ ID NO: 5645 - DNA, 25 bp, Homo sapiens
  source 1..25: mol_type = other DNA
tccacacctctcggcaagctgaggg

SEQ ID NO: 5646 - DNA, 23 bp, Homo sapiens
  source 1..23: mol_type = other DNA
tatatacctctgcatgttcagag

SEQ ID NO: 5647 - DNA, 23 bp, Homo sapiens
  source 1..23: mol_type = other DNA
tactcacctctgcatccctaggc

SEQ ID NO: 5648 - DNA, 22 bp, Homo sapiens
  source 1..22: mol_type = other DNA
tactccctctgcatactaatgg

SEQ ID NO: 5649 - DNA, 23 bp, Homo sapiens
  source 1..23: mol_type = other DNA
atctcatctctgcatgctctagg

SEQ ID NO: 5650 - DNA, 23 bp, Homo sapiens
  source 1..23: mol_type = other DNA
ggctcacccctgcatgctcgagg

SEQ ID NO: 5651 - DNA, 22 bp, Homo sapiens
  source 1..22: mol_type = other DNA
tacacacatcccatgctcatgg

SEQ ID NO: 5652 - DNA, 22 bp, Homo sapiens
  source 1..22: mol_type = other DNA
ttctatatctgcatgctcacga

SEQ ID NO: 5653 - DNA, 22 bp, Homo sapiens
  source 1..22: mol_type = other DNA
tactcactcagcatgcccctgg

SEQ ID NO: 5654 - DNA, 22 bp, Homo sapiens
  source 1..22: mol_type = other DNA
tactctctctgcatacacagag

SEQ ID NO: 5655 - DNA, 23 bp, Homo sapiens
  source 1..23: mol_type = other DNA
atgtaacctctgcatgctcagaa

SEQ ID NO: 5656 - DNA, 23 bp, Homo sapiens
  source 1..23: mol_type = other DNA
acaccacctatgcatgcttatgg

SEQ ID NO: 5657 - DNA, 23 bp, Homo sapiens
  source 1..23: mol_type = other DNA
cattcacatatgcatgctcatgg

SEQ ID NO: 5658 - DNA, 23 bp, Homo sapiens
  source 1..23: mol_type = other DNA
cactcacctctccatgctaaggt

SEQ ID NO: 5659 - DNA, 22 bp, Homo sapiens
  source 1..22: mol_type = other DNA
tgttcacactgcatgctctggg

SEQ ID NO: 5660 - DNA, 23 bp, Homo sapiens
  source 1..23: mol_type = other DNA
tactaacctttgcatgcacacag

SEQ ID NO: 5661 - DNA, 22 bp, Homo sapiens
  source 1..22: mol_type = other DNA
tactcccctaacatgctcttgg

SEQ ID NO: 5662 - DNA, 22 bp, Homo sapiens
  source 1..22: mol_type = other DNA
ctctcactctgcatgcacacag

SEQ ID NO: 5663 - DNA, 22 bp, Homo sapiens
  source 1..22: mol_type = other DNA
ttgctaccttgcatgctcatgg

SEQ ID NO: 5664 - DNA, 22 bp, Homo sapiens
  source 1..22: mol_type = other DNA
cactacctctgcaggctctagg

SEQ ID NO: 5665 - DNA, 22 bp, Homo sapiens
  source 1..22: mol_type = other DNA
ttgtcacctctgcagctcacag

SEQ ID NO: 5666 - DNA, 22 bp, Homo sapiens
  source 1..22: mol_type = other DNA
atctcactctacttgctcaggg

SEQ ID NO: 5667 - DNA, 22 bp, Homo sapiens
  source 1..22: mol_type = other DNA
tcctcctatctgcatgtcaagg

SEQ ID NO: 5668 - DNA, 22 bp, Homo sapiens
  source 1..22: mol_type = other DNA
tatatccctctgatgctcaggg

SEQ ID NO: 5669 - DNA, 21 bp, Homo sapiens
  source 1..21: mol_type = other DNA
cactcacatgcatgctcaaag

SEQ ID NO: 5670 - DNA, 23 bp, Homo sapiens
  source 1..23: mol_type = other DNA
ctcttacctctaaatgctcagag

SEQ ID NO: 5671 - DNA, 22 bp, Homo sapiens
  source 1..22: mol_type = other DNA
tgcacatatctcatgctcaagg

SEQ ID NO: 5672 - DNA, 23 bp, Homo sapiens
  source 1..23: mol_type = other DNA
tactcacttctgtatgcccagtg

SEQ ID NO: 5673 - DNA, 22 bp, Homo sapiens
  source 1..22: mol_type = other DNA
gagtcacccctgcatgtcaggg

SEQ ID NO: 5674 - DNA, 23 bp, Homo sapiens
  source 1..23: mol_type = other DNA
tgattccctatgcatgcccatgg

SEQ ID NO: 5675 - DNA, 23 bp, Homo sapiens
  source 1..23: mol_type = other DNA
caccccccactgcatgctcaggg

SEQ ID NO: 5676 - DNA, 21 bp, Homo sapiens
  source 1..21: mol_type = other DNA
tcctcacctgcatactcagag

SEQ ID NO: 5677 - DNA, 23 bp, Homo sapiens
  source 1..23: mol_type = other DNA
tcctcacctctacatgttccggc

SEQ ID NO: 5678 - DNA, 22 bp, Homo sapiens
  source 1..22: mol_type = other DNA
gaaacacatctcatgctcaggg

SEQ ID NO: 5679 - DNA, 23 bp, Homo sapiens
  source 1..23: mol_type = other DNA
tcttcactactgcatgcacctgg

SEQ ID NO: 5680 - DNA, 24 bp, Homo sapiens
  source 1..24: mol_type = other DNA
ctctcagcctctgcatgctctgag

SEQ ID NO: 5681 - DNA, 23 bp, Homo sapiens
  source 1..23: mol_type = other DNA
ccccaacctctgcatgctcagaa

SEQ ID NO: 5682 - DNA, 22 bp, Homo sapiens
  source 1..22: mol_type = other DNA
tacttgcactgcatgctcactg

SEQ ID NO: 5683 - DNA, 23 bp, Homo sapiens
  source 1..23: mol_type = other DNA
gagtcacacctgcatgctcatag

SEQ ID NO: 5684 - DNA, 24 bp, Homo sapiens
  source 1..24: mol_type = other DNA
ttctcttctactgcatgctcaggc

SEQ ID NO: 5685 - DNA, 22 bp, Homo sapiens
  source 1..22: mol_type = other DNA
gaaacgcctctcatgctcatgg

SEQ ID NO: 5686 - DNA, 23 bp, Homo sapiens
  source 1..23: mol_type = other DNA
gcctcataacagcatgctcatgg

SEQ ID NO: 5687 - DNA, 23 bp, Homo sapiens
  source 1..23: mol_type = other DNA
tattcacttctgcatgcccagtg

SEQ ID NO: 5688 - DNA, 22 bp, Homo sapiens
  source 1..22: mol_type = other DNA
ctctcactctgcatgctaatga

SEQ ID NO: 5689 - DNA, 23 bp, Homo sapiens
  source 1..23: mol_type = other DNA
tattcacctctgcattaccaggg

SEQ ID NO: 5690 - DNA, 22 bp, Homo sapiens
  source 1..22: mol_type = other DNA
ttatccctttgcatgctcatag

SEQ ID NO: 5691 - DNA, 23 bp, Homo sapiens
  source 1..23: mol_type = other DNA
cactcacacatgcatgcacacag

SEQ ID NO: 5692 - DNA, 23 bp, Homo sapiens
  source 1..23: mol_type = other DNA
tgttcagttatgcatgctcacag

SEQ ID NO: 5693 - DNA, 23 bp, Homo sapiens
  source 1..23: mol_type = other DNA
tatgcatctctgtatgctcaaag

SEQ ID NO: 5694 - DNA, 23 bp, Homo sapiens
  source 1..23: mol_type = other DNA
tcccattctctgcatgcttaagg

SEQ ID NO: 5695 - DNA, 24 bp, Homo sapiens
  source 1..24: mol_type = other DNA
cctgcacctctgacatgctcaggg

SEQ ID NO: 5696 - DNA, 23 bp, Homo sapiens
  source 1..23: mol_type = other DNA
tccccacccccacatgcccaggg

SEQ ID NO: 5697 - DNA, 23 bp, Homo sapiens
  source 1..23: mol_type = other DNA
caatcaccccagtatgctcagag

SEQ ID NO: 5698 - DNA, 22 bp, Homo sapiens
  source 1..22: mol_type = other DNA
cactgcctatgtatgctcaagg

SEQ ID NO: 5699 - DNA, 23 bp, Homo sapiens
  source 1..23: mol_type = other DNA
tccttcccactccatgctccagg

SEQ ID NO: 5700 - DNA, 22 bp, Homo sapiens
  source 1..22: mol_type = other DNA
aactacctcggcttgctcaaag

SEQ ID NO: 5701 - DNA, 22 bp, Homo sapiens
  source 1..22: mol_type = other DNA
tactcacccgacatggtcagtg

SEQ ID NO: 5702 - DNA, 23 bp, Homo sapiens
  source 1..23: mol_type = other DNA
tcctcatctctgtatgctcagga

SEQ ID NO: 5703 - DNA, 23 bp, Homo sapiens
  source 1..23: mol_type = other DNA
ttgtaacatctgcatgcttatga

SEQ ID NO: 5704 - DNA, 23 bp, Homo sapiens
  source 1..23: mol_type = other DNA
tcatcacatgtgtatgctcatgg

SEQ ID NO: 5705 - DNA, 22 bp, Homo sapiens
  source 1..22: mol_type = other DNA
taccacgtttgcaggctcacag

SEQ ID NO: 5706 - DNA, 23 bp, Homo sapiens
  source 1..23: mol_type = other DNA
tactcatctctgcatgagcagtt

SEQ ID NO: 5707 - DNA, 22 bp, Homo sapiens
  source 1..22: mol_type = other DNA
cactcatctctgcaactcatgg

SEQ ID NO: 5708 - DNA, 22 bp, Homo sapiens
  source 1..22: mol_type = other DNA
cactcatctcctcatctcaagg

SEQ ID NO: 5709 - DNA, 23 bp, Homo sapiens
  source 1..23: mol_type = other DNA
cactcatctagacatgctcaagg

SEQ ID NO: 5710 - DNA, 22 bp, Homo sapiens
  source 1..22: mol_type = other DNA
tactccctttgcaagctcccag

SEQ ID NO: 5711 - DNA, 23 bp, Homo sapiens
  source 1..23: mol_type = other DNA
ttctcaaacctgcatgcacattg

SEQ ID NO: 5712 - DNA, 21 bp, Homo sapiens
  source 1..21: mol_type = other DNA
taatcctctgcatgttcaagc

SEQ ID NO: 5713 - DNA, 23 bp, Homo sapiens
  source 1..23: mol_type = other DNA
tattcaactcagcatgttcactg

SEQ ID NO: 5714 - DNA, 23 bp, Homo sapiens
  source 1..23: mol_type = other DNA
gactcaccactgcacgttaagag

SEQ ID NO: 5715 - DNA, 21 bp, Homo sapiens
  source 1..21: mol_type = other DNA
tacccacccctgcatgaatgg

SEQ ID NO: 5716 - DNA, 23 bp, Homo sapiens
  source 1..23: mol_type = other DNA
ctctcacctctgcctcctcagta

SEQ ID NO: 5717 - DNA, 23 bp, Homo sapiens
  source 1..23: mol_type = other DNA
gactcacccctccatggtcatgc

SEQ ID NO: 5718 - DNA, 22 bp, Homo sapiens
  source 1..22: mol_type = other DNA
tcctcacaacccatgctcaggg

SEQ ID NO: 5719 - DNA, 22 bp, Homo sapiens
  source 1..22: mol_type = other DNA
tcctgacctctcaggctcaagc

SEQ ID NO: 5720 - DNA, 22 bp, Homo sapiens
  source 1..22: mol_type = other DNA
tacccaccactgcagccaaggg

SEQ ID NO: 5721 - DNA, 22 bp, Homo sapiens
  source 1..22: mol_type = other DNA
ttctacctctagatgttcaggg

SEQ ID NO: 5722 - DNA, 22 bp, Homo sapiens
  source 1..22: mol_type = other DNA
tgctctcactgcatgcccaggg

SEQ ID NO: 5723 - DNA, 23 bp, Homo sapiens
  source 1..23: mol_type = other DNA
taataagctctgcatgcccatct

SEQ ID NO: 5724 - DNA, 23 bp, Homo sapiens
  source 1..23: mol_type = other DNA
ttatcacctctctatgctcagaa

SEQ ID NO: 5725 - DNA, 23 bp, Homo sapiens
  source 1..23: mol_type = other DNA
tacttaccactgcattgtcttgg

SEQ ID NO: 5726 - DNA, 23 bp, Homo sapiens
  source 1..23: mol_type = other DNA
ttctcacctctgcatcccaagta

SEQ ID NO: 5727 - DNA, 23 bp, Homo sapiens
  source 1..23: mol_type = other DNA
tactcactcctccatgattatgt

SEQ ID NO: 5728 - DNA, 22 bp, Homo sapiens
  source 1..22: mol_type = other DNA
tactcacttcttcatctctagc

SEQ ID NO: 5729 - DNA, 23 bp, Homo sapiens
  source 1..23: mol_type = other DNA
tacttacctctgaatcctcagaa

SEQ ID NO: 5730 - DNA, 23 bp, Homo sapiens
  source 1..23: mol_type = other DNA
ttatgacctctacctgctctggg

SEQ ID NO: 5731 - DNA, 23 bp, Homo sapiens
  source 1..23: mol_type = other DNA
tactcatctctgcatgtgggtgt

SEQ ID NO: 5732 - DNA, 23 bp, Homo sapiens
  source 1..23: mol_type = other DNA
tactcacctttgcatgaaagtgg

SEQ ID NO: 5733 - DNA, 23 bp, Homo sapiens
  source 1..23: mol_type = other DNA
tactaacgtttgcatgcaaattg

SEQ ID NO: 5734 - DNA, 23 bp, Homo sapiens
  source 1..23: mol_type = other DNA
gtctcacctttgcatctacaagg

SEQ ID NO: 5735 - DNA, 23 bp, Homo sapiens
  source 1..23: mol_type = other DNA
aactctcctatgcattctcagct

SEQ ID NO: 5736 - DNA, 22 bp, Homo sapiens
  source 1..22: mol_type = other DNA
tactcaactctgctgccatggg

SEQ ID NO: 5737 - DNA, 21 bp, Homo sapiens
  source 1..21: mol_type = other DNA
ttcttaactctgcattcaagg

SEQ ID NO: 5738 - DNA, 22 bp, Homo sapiens
  source 1..22: mol_type = other DNA
tacttactctgcaagataaggg

SEQ ID NO: 5739 - DNA, 23 bp, Homo sapiens
  source 1..23: mol_type = other DNA
tacataacactgcatgttcatgg

SEQ ID NO: 5740 - DNA, 23 bp, Homo sapiens
  source 1..23: mol_type = other DNA
tggtcacctctacaagcacaggg

SEQ ID NO: 5741 - DNA, 23 bp, Homo sapiens
  source 1..23: mol_type = other DNA
tagacacataagcatgctcacag

SEQ ID NO: 5742 - DNA, 22 bp, Homo sapiens
  source 1..22: mol_type = other DNA
tactcacctcccatgcacaggc

SEQ ID NO: 5743 - DNA, 22 bp, Homo sapiens
  source 1..22: mol_type = other DNA
tagtgttctctgcatgccaggg

SEQ ID NO: 5744 - DNA, 23 bp, Homo sapiens
  source 1..23: mol_type = other DNA
gactcacctctgcacacctaggc

SEQ ID NO: 5745 - DNA, 23 bp, Homo sapiens
  source 1..23: mol_type = other DNA
tgctgacctcagccagcttaagg

SEQ ID NO: 5746 - RNA, 4929 nt, synthetic construct
  misc_feature 1..4929: note = Description of Artificial Sequence: Synthetic polynucleotide
  source 1..4929: mol_type = other RNA
atgagcgaggtggagttcagccacgagtactggatgcggcacgccctgaccctggccaagcgggcccgggacgagcgggaggtgcccgtgggcgccgtgctggtgctgaacaaccgggtgatcggcgagggctggaaccgggccatcggcctgcacgaccccaccgcccacgccgagatcatggccctgcggcagggcggcctggtgatgcagaactaccggctgatcgacgccaccctgtacgtgaccttcgagccctgcgtgatgtgcgccggcgccatgatccacagccggatcggccgggtggtgttcggcgtgcggaacgccaagaccggcgccgccggcagcctgatggacgtgctgcaccaccccggcatgaaccaccgggtggagatcaccgagggcatcctggccgacgagtgcgccgccctgctgtgccggttcttccggatgccccggcgggtgttcaacgcccagaagaaggcccagagcagcaccgacaggaaataagagagaaaagaagagtaagaagaaatataagagccaccagcggcggcagcagcggcggcagcagcggcagcgagacacccggcaccagcgagagcgccacccccgagagcagcggcggcagcagcggcggcagcgacaagaagtacagcatcggcctggccatcggcaccaacagcgtgggctgggccgtgatcaccgacgagtacaaggtgcccagcaagaagttcaaggtgctgggcaacaccgaccggcacagcatcaagaagaacctgatcggcgccctgctgttcgacagcggcgagacagccgaggccacccggctgaagcggaccgcccggcggcggtacacccggcggaagaaccggatctgctacctgcaggagatcttcagcaacgagatggccaaggtggacgacagcttcttccaccggctggaggagagcttcctggtggaggaggacaagaagcacgagcggcaccccatcttcggcaacatcgtggacgaggtggcctaccacgagaagtaccccaccatctaccacctgcggaagaagctggtggacagcaccgacaaggccgacctgcggctgatctacctggccctggcccacatgatcaagttccggggccacttcctgatcgagggcgacctgaaccccgacaacagcgacgtggacaagctgttcatccagctggtgcagacctacaaccagctgttcgaggagaaccccatcaacgccagcggcgtggacgccaaggccatcctgagcgcccggctgagcaagagccggcggctggagaacctgatcgcccagctgcccggcgagaagaagaacggcctgttcggcaacctgatcgccctgagcctgggcctgacccccaacttcaagagcaacttcgacctggccgaggacgccaagctgcagctgagcaaggacacctacgacgacgacctggacaacctgctggcccagatcggcgaccagtacgccgacctgttcctggccgccaagaacctgagcgacgccatcctgctgagcgacatcctgcgggtgaacaccgagatcaccaaggcccccctgagcgccagcatgatcaagcggtacgacgagcaccaccaggacctgaccctgctgaaggccctggtgcggcagcagctgcccgagaagtacaaggagatcttcttcgaccagagcaagaacggctacgccggctacatcgacggcggcgccagccaggaggagttctacaagttcatcaagcccatcctggagaagatggacggcaccgaggagctgctggtgaagctgaaccgggaggacctgctgcggaagcagcggaccttcgacaacggcagcatcccccaccagatccacctgggcgagctgcacgccatcctgcggcggcaggaggacttctaccccttcctgaaggacaaccgggagaagatcgagaagatcctgaccttccggatcccctactacgtgggccccctggcccggggcaacagccggttcgcctggatgacccgcaagagcgaggagacaatcaccccctggaacttcgaggaggtggtggacaagggcgccagcgcccagagcttcatcgagcggatgaccaacttcgacaagaacctgcccaacgagaaggtgctgcccaagcacagcctgctgtacgagtacttcaccgtgtacaacgagctgaccaaggtgaagtacgtgaccgagggcatgcggaagcccgccttcctgagcggcgagcagaagaaggccatcgtggacctgctgttcaagaccaaccggaaggtgaccgtgaagcagctgaaggaggactacttcaagaagatcgagtgcttcgacagcgtggagatcagcggcgtggaggaccggttcaacgccagcctgggcacctaccacgacctgctgaagatcatcaaggacaaggacttcctggacaacgaggagaacgaggacatcctggaggacatcgtgctgaccctgaccctgttcgaggaccgggagatgatcgaggagcggctgaagacctacgcccacctgttcgacgacaaggtgatgaagcagctgaagcggcggcggtacaccggctggggccggctgagccggaagctgatcaacggcatccgggacaagcagagcggcaagaccatcctggacttcctcaagagcgacggcttcgccaaccggaacttcatgcagctgatccacgacgacagcctgaccttcaaggaggacatccagaaggcccaggtgagcggccagggcgacagcctgcacgagcacatcgccaacctggccggcagccccgccatcaagaagggcatcctgcagaccgtgaaggtggtggacgagctggtgaaggtgatgggccggcacaagcccgagaacatcgtgatcgagatggcccgggagaaccagaccacccagaagggccagaagaacagccgggagcggatgaagcggatcgaggagggcatcaaggagctgggcagccagatcctgaaggagcaccccgtggagaacacccagctgcagaacgagaagctgtacctgtactacctgcagaacggccgggacatgtacgtggaccaggagctggacatcaaccggctgagcgactacgacgtggaccacatcgtgccccagagcttcctgaaggacgacagcatcgacaacaaggtgctgacccggagcgacaagaaccggggcaagagcgacaacgtgcccagcgaggaggtggtgaagaagatgaagaactactggcggcagctgctgaacgccaagctgatcacccagcggaagttcgacaacctgaccaaggccgagcggggcggcctgagcgagctggacaaggccggcttcatcaagcggcagctggtggagacacggcagatcaccaagcacgtggcccagatcctggacagccggatgaacaccaagtacgacgagaacgacaagctgatccgggaggtgaaggtgatcaccctcaagagcaagctggtgagcgacttccggaaggacttccagttctacaaggtgcgggagatcaacaactaccaccacgcccacgacgcctacctgaacgccgtggtgggcaccgccctgatcaagaagtaccccaagctggagagcgagttcgtgtacggcgactacaaggtgtacgacgtgcggaagatgatcgccaagagcgagcaggagatcggcaaggccaccgccaagtacttcttctacagcaacatcatgaacttcttcaagaccgagatcaccctggccaacggcgagatccggaagcggcccctgatcgagacaaacggcgagacaggcgagatcgtgtgggacaagggccgggacttcgccaccgtgcggaaggtgctgagcatgccccaggtgaacatcgtgaagaagaccgaggtgcagaccggcggcttcagcaaggagagcatcctgcccaagcggaacagcgacaagctgatcgcccggaagaaggactgggaccccaagaagtacggcggcttcgacagccccaccgtggcctacagcgtgctggtggtggccaaggtggagaagggcaagagcaagaagctcaagagcgtgaaggagctgctgggcatcaccatcatggagcggagcagcttcgagaagaaccccatcgacttcctggaggccaagggctacaaggaggtgaagaaggacctgatcatcaagctgcccaagtacagcctgttcgagctggagaacggccggaagcggatgctggccagcgccggcgagctgcagaagggcaacgagctggccctgcccagcaagtacgtgaacttcctgtacctggccagccactacgagaagctgaagggcagccccgaggacaacgagcagaagcagctgttcgtggagcagcacaagcactacctggacgagatcatcgagcagatcagcgagttcagcaagcgggtgatcctggccgacgccaacctggacaaggtgctgagcgcctacaacaagcaccgggacaagcccatccgggagcaggccgagaacatcatccacctgttcaccctgaccaacctgggcgcccccgccgccttcaagtacttcgacaccaccatcgaccggaagcggtacaccagcaccaaggaggtgctggacgccaccctgatccaccagagcatcaccggcctgtacgagacacggatcgacctgagccagctgggcggcgacgagggcgccgacaagcggaccgccgacggcagcgagttcgagagccccaagaagaagcggaaggtgtgagcggccgcttaattaagctgccttctgcggggcttgccttctggccatgcccttcttctctcccttgcacctgtacctcttggtctttgaataaagcctgagtaggaagtctaga

SEQ ID NO: 5747 - protein, 1588 aa, synthetic construct
  REGION 1..1588: note = Description of Artificial Sequence: Synthetic polypeptide
MSEVEFSHEYWMRHALTLAKRARDEREVPVGAVLVLNNRVIGEGWNRAIGLHDPTAHAEIMALRQGGLVMQNYRLIDATLYVTFEPCVMCAGAMIHSRIGRVVFGVRNAKTGAAGSLMDVLHHPGMNHRVEITEGILADECAALLCRFFRMPRRVFNAQKKAQSSTDSGGSSGGSSGSETPGTSESATPESSGGSSGGSDKKYSIGLAIGTNSVGWAVITDEYKVPSKKFKVLGNTDRHSIKKNLIGALLFDSGETAEATRLKRTARRRYTRRKNRICYLQEIFSNEMAKVDDSFFHRLEESFLVEEDKKHERHPIFGNIVDEVAYHEKYPTIYHLRKKLVDSTDKADLRLIYLALAHMIKFRGHFLIEGDLNPDNSDVDKLFIQLVQTYNQLFEENPINASGVDAKAILSARLSKSRRLENLIAQLPGEKKNGLFGNLIALSLGLTPNFKSNFDLAEDAKLQLSKDTYDDDLDNLLAQIGDQYADLFLAAKNLSDAILLSDILRVNTEITKAPLSASMIKRYDEHHQDLTLLKALVRQQLPEKYKEIFFDQSKNGYAGYIDGGASQEEFYKFIKPILEKMDGTEELLVKLNREDLLRKQRTFDNGSIPHQIHLGELHAILRRQEDFYPFLKDNREKIEKILTFRIPYYVGPLARGNSRFAWMTRKSEETITPWNFEEVVDKGASAQSFIERMTNFDKNLPNEKVLPKHSLLYEYFTVYNELTKVKYVTEGMRKPAFLSGEQKKAIVDLLFKTNRKVTVKQLKEDYFKKIECFDSVEISGVEDRFNASLGTYHDLLKIIKDKDFLDNEENEDILEDIVLTLTLFEDREMIEERLKTYAHLFDDKVMKQLKRRRYTGWGRLSRKLINGIRDKQSGKTILDFLKSDGFANRNFMQLIHDDSLTFKEDIQKAQVSGQGDSLHEHIANLAGSPAIKKGILQTVKVVDELVKVMGRHKPENIVIEMARENQTTQKGQKNSRERMKRIEEGIKELGSQILKEHPVENTQLQNEKLYLYYLQNGRDMYVDQELDINRLSDYDVDHIVPQSFLKDDSIDNKVLTRSDKNRGKSDNVPSEEVVKKMKNYWRQLLNAKLITQRKFDNLTKAERGGLSELDKAGFIKRQLVETRQITKHVAQILDSRMNTKYDENDKLIREVKVITLKSKLVSDFRKDFQFYKVREINNYHHAHDAYLNAVVGTALIKKYPKLESEFVYGDYKVYDVRKMIAKSEQEIGKATAKYFFYSNIMNFFKTEITLANGEIRKRPLIETNGETGEIVWDKGRDFATVRKVLSMPQVNIVKKTEVQTGGFSKESILPKRNSDKLIARKKDWDPKKYGGFDSPTVAYSVLVVAKVEKGKSKKLKSVKELLGITIMERSSFEKNPIDFLEAKGYKEVKKDLIIKLPKYSLFELENGRKRMLASAGELQKGNELALPSKYVNFLYLASHYEKLKGSPEDNEQKQLFVEQHKHYLDEIIEQISEFSKRVILADANLDKVLSAYNKHRDKPIREQAENIIHLFTLTNLGAPAAFKYFDTTIDRKRYTSTKEVLDATLIHQSITGLYETRIDLSQLGGDEGADKRTADGSEFESPKKKRKV

SEQ ID NO: 5748 - RNA, 47 nt, synthetic construct
  misc_feature 1..47: note = Description of Artificial Sequence: Synthetic oligonucleotide
  source 1..47: mol_type = other RNA
aggaaataagagagaaaagaagagtaagaagaaatataagagccacc

SEQ ID NO: 5749 - RNA, 501 nt, synthetic construct
  misc_feature 1..501: note = Description of Artificial Sequence: Synthetic polynucleotide
  source 1..501: mol_type = other RNA
atgagcgaggtggagttcagccacgagtactggatgcggcacgccctgaccctggccaagcgggcccgggacgagcgggaggtgcccgtgggcgccgtgctggtgctgaacaaccgggtgatcggcgagggctggaaccgggccatcggcctgcacgaccccaccgcccacgccgagatcatggccctgcggcagggcggcctggtgatgcagaactaccggctgatcgacgccaccctgtacgtgaccttcgagccctgcgtgatgtgcgccggcgccatgatccacagccggatcggccgggtggtgttcggcgtgcggaacgccaagaccggcgccgccggcagcctgatggacgtgctgcaccaccccggcatgaaccaccgggtggagatcaccgagggcatcctggccgacgagtgcgccgccctgctgtgccggttcttccggatgccccggcgggtgttcaacgcccagaagaaggcccagagcagcaccgac

SEQ ID NO: 5750 - protein, 167 aa, synthetic construct
  REGION 1..167: note = Description of Artificial Sequence: Synthetic polypeptide
MSEVEFSHEYWMRHALTLAKRARDEREVPVGAVLVLNNRVIGEGWNRAIGLHDPTAHAEIMALRQGGLVMQNYRLIDATLYVTFEPCVMCAGAMIHSRIGRVVFGVRNAKTGAAGSLMDVLHHPGMNHRVEITEGILADECAALLCRFFRMPRRVFNAQKKAQSSTD

SEQ ID NO: 5751 - RNA, 96 nt, synthetic construct
  misc_feature 1..96: note = Description of Artificial Sequence: Synthetic oligonucleotide
  source 1..96: mol_type = other RNA
agcggcggcagcagcggcggcagcagcggcagcgagacacccggcaccagcgagagcgccacccccgagagcagcggcggcagcagcggcggcagc

SEQ ID NO: 5752 - protein, 32 aa, synthetic construct
  REGION 1..32: note = Description of Artificial Sequence: Synthetic polypeptide
SGGSSGGSSGSETPGTSESATPESSGGSSGGS

SEQ ID NO: 5753 - RNA, 4101 nt, synthetic construct
  misc_feature 1..4101: note = Description of Artificial Sequence: Synthetic polynucleotide
  source 1..4101: mol_type = other RNA
gacaagaagtacagcatcggcctggccatcggcaccaacagcgtgggctgggccgtgatcaccgacgagtacaaggtgcccagcaagaagttcaaggtgctgggcaacaccgaccggcacagcatcaagaagaacctgatcggcgccctgctgttcgacagcggcgagacagccgaggccacccggctgaagcggaccgcccggcggcggtacacccggcggaagaaccggatctgctacctgcaggagatcttcagcaacgagatggccaaggtggacgacagcttcttccaccggctggaggagagcttcctggtggaggaggacaagaagcacgagcggcaccccatcttcggcaacatcgtggacgaggtggcctaccacgagaagtaccccaccatctaccacctgcggaagaagctggtggacagcaccgacaaggccgacctgcggctgatctacctggccctggcccacatgatcaagttccggggccacttcctgatcgagggcgacctgaaccccgacaacagcgacgtggacaagctgttcatccagctggtgcagacctacaaccagctgttcgaggagaaccccatcaacgccagcggcgtggacgccaaggccatcctgagcgcccggctgagcaagagccggcggctggagaacctgatcgcccagctgcccggcgagaagaagaacggcctgttcggcaacctgatcgccctgagcctgggcctgacccccaacttcaagagcaacttcgacctggccgaggacgccaagctgcagctgagcaaggacacctacgacgacgacctggacaacctgctggcccagatcggcgaccagtacgccgacctgttcctggccgccaagaacctgagcgacgccatcctgctgagcgacatcctgcgggtgaacaccgagatcaccaaggcccccctgagcgccagcatgatcaagcggtacgacgagcaccaccaggacctgaccctgctgaaggccctggtgcggcagcagctgcccgagaagtacaaggagatcttcttcgaccagagcaagaacggctacgccggctacatcgacggcggcgccagccaggaggagttctacaagttcatcaagcccatcctggagaagatggacggcaccgaggagctgctggtgaagctgaaccgggaggacctgctgcggaagcagcggaccttcgacaacggcagcatcccccaccagatccacctgggcgagctgcacgccatcctgcggcggcaggaggacttctaccccttcctgaaggacaaccgggagaagatcgagaagatcctgaccttccggatcccctactacgtgggccccctggcccggggcaacagccggttcgcctggatgacccgcaagagcgaggagacaatcaccccctggaacttcgaggaggtggtggacaagggcgccagcgcccagagcttcatcgagcggatgaccaacttcgacaagaacctgcccaacgagaaggtgctgcccaagcacagcctgctgtacgagtacttcaccgtgtacaacgagctgaccaaggtgaagtacgtgaccgagggcatgcggaagcccgccttcctgagcggcgagcagaagaaggccatcgtggacctgctgttcaagaccaaccggaaggtgaccgtgaagcagctgaaggaggactacttcaagaagatcgagtgcttcgacagcgtggagatcagcggcgtggaggaccggttcaacgccagcctgggcacctaccacgacctgctgaagatcatcaaggacaaggacttcctggacaacgaggagaacgaggacatcctggaggacatcgtgctgaccctgaccctgttcgaggaccgggagatgatcgaggagcggctgaagacctacgcccacctgttcgacgacaaggtgatgaagcagctgaagcggcggcggtacaccggctggggccggctgagccggaagctgatcaacggcatccgggacaagcagagcggcaagaccatcctggacttcctcaagagcgacggcttcgccaaccggaacttcatgcagctgatccacgacgacagcctgaccttcaaggaggacatccagaaggcccaggtgagcggccagggcgacagcctgcacgagcacatcgccaacctggccggcagccccgccatcaagaagggcatcctgcagaccgtgaaggtggtggacgagctggtgaaggtgatgggccggcacaagcccgagaacatcgtgatcgagatggcccgggagaaccagaccacccagaagggccagaagaacagccgggagcggatgaagcggatcgaggagggcatcaaggagctgggcagccagatcctgaaggagcaccccgtggagaacacccagctgcagaacgagaagctgtacctgtactacctgcagaacggccgggacatgtacgtggaccaggagctggacatcaaccggctgagcgactacgacgtggaccacatcgtgccccagagcttcctgaaggacgacagcatcgacaacaaggtgctgacccggagcgacaagaaccggggcaagagcgacaacgtgcccagcgaggaggtggtgaagaagatgaagaactactggcggcagctgctgaacgccaagctgatcacccagcggaagttcgacaacctgaccaaggccgagcggggcggcctgagcgagctggacaaggccggcttcatcaagcggcagctggtggagacacggcagatcaccaagcacgtggcccagatcctggacagccggatgaacaccaagtacgacgagaacgacaagctgatccgggaggtgaaggtgatcaccctcaagagcaagctggtgagcgacttccggaaggacttccagttctacaaggtgcgggagatcaacaactaccaccacgcccacgacgcctacctgaacgccgtggtgggcaccgccctgatcaagaagtaccccaagctggagagcgagttcgtgtacggcgactacaaggtgtacgacgtgcggaagatgatcgccaagagcgagcaggagatcggcaaggccaccgccaagtacttcttctacagcaacatcatgaacttcttcaagaccgagatcaccctggccaacggcgagatccggaagcggcccctgatcgagacaaacggcgagacaggcgagatcgtgtgggacaagggccgggacttcgccaccgtgcggaaggtgctgagcatgccccaggtgaacatcgtgaagaagaccgaggtgcagaccggcggcttcagcaaggagagcatcctgcccaagcggaacagcgacaagctgatcgcccggaagaaggactgggaccccaagaagtacggcggcttcgacagccccaccgtggcctacagcgtgctggtggtggccaaggtggagaagggcaagagcaagaagctcaagagcgtgaaggagctgctgggcatcaccatcatggagcggagcagcttcgagaagaaccccatcgacttcctggaggccaagggctacaaggaggtgaagaaggacctgatcatcaagctgcccaagtacagcctgttcgagctggagaacggccggaagcggatgctggccagcgccggcgagctgcagaagggcaacgagctggccctgcccagcaagtacgtgaacttcctgtacctggccagccactacgagaagctgaagggcagccccgaggacaacgagcagaagcagctgttcgtggagcagcacaagcactacctggacgagatcatcgagcagatcagcgagttcagcaagcgggtgatcctggccgacgccaacctggacaaggtgctgagcgcctacaacaagcaccgggacaagcccatccgggagcaggccgagaacatcatccacctgttcaccctgaccaacctgggcgcccccgccgccttcaagtacttcgacaccaccatcgaccggaagcggtacaccagcaccaaggaggtgctggacgccaccctgatccaccagagcatcaccggcctgtacgagacacggatcgacctgagccagctgggcggcgac

SEQ ID NO: 5754 - protein, 1367 aa, synthetic construct
  REGION 1..1367: note = Description of Artificial Sequence: Synthetic polypeptide
DKKYSIGLAIGTNSVGWAVITDEYKVPSKKFKVLGNTDRHSIKKNLIGALLFDSGETAEATRLKRTARRRYTRRKNRICYLQEIFSNEMAKVDDSFFHRLEESFLVEEDKKHERHPIFGNIVDEVAYHEKYPTIYHLRKKLVDSTDKADLRLIYLALAHMIKFRGHFLIEGDLNPDNSDVDKLFIQLVQTYNQLFEENPINASGVDAKAILSARLSKSRRLENLIAQLPGEKKNGLFGNLIALSLGLTPNFKSNFDLAEDAKLQLSKDTYDDDLDNLLAQIGDQYADLFLAAKNLSDAILLSDILRVNTEITKAPLSASMIKRYDEHHQDLTLLKALVRQQLPEKYKEIFFDQSKNGYAGYIDGGASQEEFYKFIKPILEKMDGTEELLVKLNREDLLRKQRTFDNGSIPHQIHLGELHAILRRQEDFYPFLKDNREKIEKILTFRIPYYVGPLARGNSRFAWMTRKSEETITPWNFEEVVDKGASAQSFIERMTNFDKNLPNEKVLPKHSLLYEYFTVYNELTKVKYVTEGMRKPAFLSGEQKKAIVDLLFKTNRKVTVKQLKEDYFKKIECFDSVEISGVEDRFNASLGTYHDLLKIIKDKDFLDNEENEDILEDIVLTLTLFEDREMIEERLKTYAHLFDDKVMKQLKRRRYTGWGRLSRKLINGIRDKQSGKTILDFLKSDGFANRNFMQLIHDDSLTFKEDIQKAQVSGQGDSLHEHIANLAGSPAIKKGILQTVKVVDELVKVMGRHKPENIVIEMARENQTTQKGQKNSRERMKRIEEGIKELGSQILKEHPVENTQLQNEKLYLYYLQNGRDMYVDQELDINRLSDYDVDHIVPQSFLKDDSIDNKVLTRSDKNRGKSDNVPSEEVVKKMKNYWRQLLNAKLITQRKFDNLTKAERGGLSELDKAGFIKRQLVETRQITKHVAQILDSRMNTKYDENDKLIREVKVITLKSKLVSDFRKDFQFYKVREINNYHHAHDAYLNAVVGTALIKKYPKLESEFVYGDYKVYDVRKMIAKSEQEIGKATAKYFFYSNIMNFFKTEITLANGEIRKRPLIETNGETGEIVWDKGRDFATVRKVLSMPQVNIVKKTEVQTGGFSKESILPKRNSDKLIARKKDWDPKKYGGFDSPTVAYSVLVVAKVEKGKSKKLKSVKELLGITIMERSSFEKNPIDFLEAKGYKEVKKDLIIKLPKYSLFELENGRKRMLASAGELQKGNELALPSKYVNFLYLASHYEKLKGSPEDNEQKQLFVEQHKHYLDEIIEQISEFSKRVILADANLDKVLSAYNKHRDKPIREQAENIIHLFTLTNLGAPAAFKYFDTTIDRKRYTSTKEVLDATLIHQSITGLYETRIDLSQLGGD

SEQ ID NO: 5755 - RNA, 12 nt, synthetic construct
  misc_feature 1..12: note = Description of Artificial Sequence: Synthetic oligonucleotide
  source 1..12: mol_type = other RNA
gagggcgccgac

SEQ ID NO: 5756 - protein, 4 aa, synthetic construct
  REGION 1..4: note = Description of Artificial Sequence: Synthetic peptide
EGAD

SEQ ID NO: 5757 - RNA, 57 nt, synthetic construct
  misc_feature 1..57: note = Description of Artificial Sequence: Synthetic oligonucleotide
  source 1..57: mol_type = other RNA
aagcggaccgccgacggcagcgagttcgagagccccaagaagaagcggaaggtgtga

SEQ ID NO: 5758 - protein, 18 aa, synthetic construct
  REGION 1..18: note = Description of Artificial Sequence: Synthetic peptide
KRTADGSEFESPKKKRKV

SEQ ID NO: 5759 - RNA, 115 nt, synthetic construct
  misc_feature 1..115: note = Description of Artificial Sequence: Synthetic polynucleotide
  source 1..115: mol_type = other RNA
gcggccgcttaattaagctgccttctgcggggcttgccttctggccatgcccttcttctctcccttgcacctgtacctcttggtctttgaataaagcctgagtaggaagtctaga

SEQ ID NO: 5760 - RNA, 100 nt, synthetic construct
  misc_feature 1..100: note = Description of Artificial Sequence: Synthetic polynucleotide
  variation 1..20: note = a, c, u, g, unknown or other
  source 1..100: mol_type = other RNA
nnnnnnnnnnnnnnnnnnnngttttagagctagaaatagcaagttaaaataaggctagtccgttatcaacttgaaaaagtggcaccgagtcggtgctttt

SEQ ID NO: 5761 - DNA, 41824 bp, Homo sapiens
  source 1..41824: mol_type = other DNA
ctcttgatcctggtctcaccatgtgatacacccacttcgccttccgccaataattggaagcttcctgaggccctcaccagaagcagatgccagcaccacacctctggttcacctgcagaaccgtgagccagttaaacctcttttctttataaactaccagcctcaggccaggtgtagtggctcacacctgtaatgccagcactttgggaggctgaggcagtcagatcacctgaggtcaggagttcaagaccagcctgaccaacatggcgaaacccgtctctactaaaaatacaaaaattagccgggcgtggtggcgggcgtctgtaatcccagctactcaggaggctgaggcaggagaatcgcttgaacctgggaggcagcggttgcagtgagccaagcgcgccactgcactccagcctgggcgacagagtgagactccgtctcaataaataaataaataaataaccagcctcaggtatttctttatagtaatgcaaaaatgaactaatccagagagtaagtaaacaggaggaaggaccacctagatcagaagcttacctcacacaggtgagggtggctagcgggtaagggattagaggcggtgagcacagcagaaggtgtgggtgaagaggcaggtacaggccaccctgtggaggacttggaacagcagctaaggctgtgggaccagactctttatgcagtaaagagccacagacaattgtgagcaagacaccttataaccaggttttagaaagaatcctcagctggaaggaggagattctgcaggaagagggtgggggaaagttgaagttaactccaaccaaagtcaaccttaaatattaacctttttttcttctgactttcattgacttttccgtgcattttcagtgcccttttcttgctgtaaagtaaattttaaatattatgtcaataggtcacagaggcaacagacaggcaaggtatggttatgagaaaaacatttccctaaacaaaattagaagacagcatttgatgaaagatttttttcctaacttgtgagtttgtttacataaaaacacttacaaaattagtcaatcaaaataacatggagtcatttacttaaagaattccttacgtttaaaaataaagtacttgaatatggaatcaacctaagtgtccatcaacttaagtgtccaatttaatccatcaactggattaaaaaactgtggtacatatataccacgggataatactcagccataaaaaagaatgaaatcatgtcttctgcagcaacatggatggaattggaggccattaacctaagtgaaataactcaaaaacagaaagtcatttgagaccagccttaccaacatggagaagccccatctctactaaaaatataaaattagccgggtgtggtggtgcatgcctgtaatcccagctactcgggaggctgaggcaggagaatcgcttgaacctgggaggcggaggttgcggtgagccgagatctcaccattgcactccagcctgggcaacaagagtgaaactctgtctcaaaaaaaaaaaaaaaaaaaaaaccgtatgttctcacttataagtggaagctaaacagtgggtacacgtgggcatacagagtggaataatagacactggggactccaaaaggtgagaagggaggagaaagtaaggattgaaaaattacctcttgggtacaacgttcactgttccggtgatgggtacactaaaaagcctagatgtaactgttatgcaatccgagcatgtaaacaatctgcagccgggcttggtggttcatgcctgtaatcccatcactttgggaggccaaggcagcaggattgcttgagcccaggagttctagaccagcctgggcaacatagtgagacctcgtctttacaaaaattttaagaaattaggtggccatggtggtgtacacctgcggtctcagctgcttgggcggctgacatgggaagatcactagagcccaggaattcaaggctgcagtgtgccatgactgtgccactgtactccagcccagatgacaaagactatgctttaaaaaaatgaaaatttaaaaatcctgcacttgtacccctgaaatatataaaaatagaaacagaaacataaataataataaaatgcatttcttttacacataaaacaaataaaagtaaagtacttgaaattagacgattccagaaaattgttgacatgtttgttcccctaacaatttggtactttggtctcctttatgaaactgtgaaagctccgagccaaaagctttgtctttcttcattcttgcatctttagtacatatcacaatgctttatatatgacacgtgcatgactatttgttgttaattgaatggtatatcatatttcaatagacattttccccaacattctattggaaaacttttcacacacatagcaaactgaaagaattttcagtgaacacttgaatttctaccaccaagatttcactattaatattttactgttcttagtttattacatatctatccatgtctgtatccattgatcaatccatcttatttctcttggtgaatttcaaattaaattatagccataagtatacttaaatacatccatacgctgaacacatcagagttgaattacagttcaagatttatttacattttttttcttctgaggcaaaatcacatagcatgaaatgcaccaattttaagtgtacatttgctaagttttgaagaatgcatacacccgtgtaaccaaacccctttcaagatgtgaaaatgaccatgaccccagaaaataccaatacctcttcctgctcaggcctcatctctatctctgagaggcaatgacttttttatttaaattttttttagttttgcctctcctagaactttatataaatggagtcatatagtgtggactctggaatagacttctatcactcagcataattttttgagattcatctaggttgtgtgtaccagtaacacatttctttttgtagaaaagaaactattttgcaatggaatgcagtagcgttctattgtataattatgtcaaaattgtttttccattctcatattgatggacacccagactgtcttcagttttgtgttatcaaaaatgaagctactataaacattcatgttcaagccttggtggccatatgttttcattgctctggggcaaatacctaaattgctgggtcatggggtaaatgtatgtgtagacattttttagaagcttttttttttttttaacaaaaatgccaggctatacttaccatgctttttctctcctagtttgccaatttattatttatttatttatttattttcttgagacaaggtctcactctgttgcccaggctggagtgcagtggcacaatcatagctcactgcagcctcaatctcccagactcaagtgatccttctgcctctgcctccagagtagatgggaccacaggcacgcaccacatcaagctattttttttatatattttttgtagagatggggatttgctatgtggccaaggctggttttgaactcctgggctcaagtgatcctcccaactcggcctcccaaagtgctggcactgcccctggactagcttgccaatttaaaagaaatccctgagtaagagcacccaaggtccgctgaatgcccttcacctcactcggaattctagagcatccgaggatctttccattccatatgatacacaccctaccacacactcaaccaacagctgactggatgagagaggtactgaacctaaaagtggccatctgcaggttgtctagaagcccaagagatagactgttcaaagatctggccacaatgggatgacaaagaataatcagtccagctaactcccttcttattaattagaaatggagacactggaaagagacatttagttaaaagtggacacagaaggaaaaagacacacaagcaaagcattcttcagatttctttgagagcagctaaattgatggttaaagagacatgcggaaattcatgcttttctaaggaatgagctctttaggagtttctcttgcaaacaaagagaaataaaattcccacataatctggagcactctaaggaagggtagaaaaatccatgttcttgctagtacaggacttagagtcttaaaaattagagaaattcgtttaagatttatagtcttaaaaattagaaaaatccacccacctgatccacattgagaagctggaatgaaataaaaataaagataatgattaaaaggaatattccctcaatatttccactccctgcatccccgacccgtctgcgtctccctctactctcatacatactccagtaatatttggccaaaagtagaagccagggggttagaaaaagaaataggataaaccaagacaaactatcaaggaagtaaaaggaacatagaggcaaacaaaatcctcatgtctctttccccctcctcctgacatagccctgataactagggaggaagagcatctgctaccgggtgcatcctctgaacattccaatgacccgacccatggaaagagaaccaaattcttcagcccagcttctaggatcttacctcaagagagtcttaaaattatgaaaagatatgtatataaggatgtttgctactatgttgtttatcatgtaaaaattgtaaacagcaggttattggtagagttccttcaaaatgagctgtgggccgggtgtggtggctcacacctgtaatcccagcactttgggaggccaagatgggaggattacctgaggtcaggagttcaagattagcctagccaacacggtgaaaccccatctctactaaaaatacaaaaagttagccatgtgtggtggcggatgcctgtaatcccagctactgaggtggctgaggcagaagaattgcttgaactcgggaggcggagcttgcagtgagccgagatcacgccactcctctccagcctaggtaacagagcgagactccatctcaaaaaaaaaaaaaaaaaagaaaaaaatcagctctgtgcagtgctacatgtggattaatgaagcattgaaagttacaacccttttggtaattgcaagggaacctggaatagatctacccaccatgctatctgacctttctaaacttgtgtgtcagttgcaaggtttattggtccactttttagatgagcaagccaaaggtgaggttcatgcaactgtggcacacctatacacaggtaaagcttttggacacagtggcctctgttactcaagggttcttaccccagtcaaagggtgttctactgcaagtagttcttaagagagaaaattcaatgtgcatttccctttggaataataatactctgaagcacagagagaacctggcacacgacaagggtgatggtgatcacaccactagtaaagaatccagtatgcactgggtaccttctctggacaggccctatgctgagcatttctcatactattgtctgatttgatcctcacaacagtcctagtgatcagtactatctattattttgcccccatttgatgggtgagttggagaagctatacaatatataaagctggtggtttgtctcttggcttttgcatcatcagacagttcaccccagctaaagaaatgatgacgggaacaagaaaaaagccaaggttaagggcacttcagaacttcagaaaaacatttgttgcctcttccaatttttggatttgttgggacagagaaaggctgtttaaaaacaattcaagagccaaagacatacaagtgtttgtttcttggtttttctttaaatgccctaagctatttttcatctctaaaaaaaagcacagggtagaaatttccattcacctgtgactggctaatctttagcgatcacttagcaactgggtaacaaatggaggttggcaaagcccagctgattagcattcttttttagtcaaaagatcagagttatcacaaggcacggccaacagctctgaggcttacaggcaatggaaaggtcagacaaagtcgctgttcgttttgtttgtctttttttttttccttcagagcaaaacaagttttctttgtttatttggtttaaaaaactcataagatctttgcaagagaacagatcctggattgtgggaagggtccccagcttgctcagtagagcttctcagtttttctatctctacagaaatctacatcagcccataatgaagatcggctatgaaatgctttgaagtctctacaaaaaaattaattgtacaatagattttcaccagtggagcaaataacagcaataatttgcaataagtgaggaaaacacatttacaatcacaaagagaattaaaagaagcttgagagaccaactagtccaatcctcccattaggacatacctcccgaccagtgaaaggaggaagggggccactaggtatcattcttggttatccactcccagggttcacagcatctgtatcaggaagttctttcttaagtttcactggagtccctcttgctactatttccagctaatctcttcttgtaactcttcataaaagaggcatcaatctttcttaagagctatcttagtcttgcttgatgtgcgtaatgaattcatgaagacctttctcttctccaggttcaatttttaaatccactggggctggcagcaggactggactttctaagtcctgaacatagaaagatttataacacagcccttggctgcaaggagcttatgttttcatggggtaaagtagatgtttaaagaaatgatggcagcagagtgttattgtgtaaagttctgacattctttgtttttgaaactttgcattttgatatctgtccattcgagattaccctatttttccatttcaaaattttagctatatttttgttacaaaatttaattcttcattccactgatggggttggggtgggggggtggggtgcaggaataatagaatgggcctgccatctagtggcaaaatgagacaaaaagaacaccaaactgtaccagcatccttgtatctataaggaggagaacaaggaatatatttcctggattcaaggtatcaaaaattgtaagatgcaccattggtttagtaagggaacaaaaagaccaaaaatggaaacaaatacaacaaatatatacatcacctggattttagaaatgctaggagaagtgaggggcatcttaaggaaatatgctcatttttcactactttctctctaacagttggcagctgatgatgagtagtgagtgcagctaacgatggggattaccatgcacccagtccctgctgtatgctgaatatttcacaattgtccacaaaagggatatcattttagccatttaacacctggagaatgggaggttcaagaaaggatccactcttgaccttagagccagcatttaaactcaggaggctggcttacagagttcacaattgttctactctcctaagctcccttctgctttctctgcaaaccgtagtgctttcccgctgctttccttgaactctctcctagacacacagacaaggtctgatgactccaattattggacttccccgcatactccagttcactcccctctcctggatcagatccatgagctgttagctcctgaaactgttccacctcagaaacctctatctcaagccccagggtatggctctattcccatcacctcttctcttccactttctagtgatttctagaaaacctttcctccctgcttacagatgccccctaacttgcagacaccctctaagtggtcctgagatagcaacctgattccttcacagccttggcatgaaatttaggaagccaggagtgtcccagagggcaacatggagatgcagagagaacaggtggctcaggggaggcctagggtcaggaattgagtccagagagggtggccccctcatcaatagaggcaaaacatcaggggccttgaaattcagcagcaagtctcagcatattggtccaaaggacaagtgcaattagacacatctcaagaaagaatggtgcggaacattcggggacagcctctctattccacagcagagaccagcatgctgggagaggcccatcccaccaggagtatgggtaggtctctccctgcacccagaggcattttaggaaaacaggagggagatgcaagacagcttaagttaacccagaaatgactactttaaaccataagaaacagaatattcttgctttggcaagtttaaatagtatcccaccccagcctccagcattggtagaaatggggctctaaacagcagttacagaagacaaatgaaggccaaatctatgcagatttgaataacagcatgtatctatcagcatgtattcaagaaagtagagtcactgtggatatcatggaagaagagacaggatagggattagacctgacacaattgtgggagaagctgggaaggcagagatctggaaggggaagtgagagtatcagagaaaactcactgtccagtcctcctgaagccctggccaagtgtattgatcagagcttgctagagatcagggaaggaaggccaagtgctgttgggctgctgaaacaggatgacagtaggggagctgggatgtgtgggtagggagtgttggccactgcaggtctacggccaagtggctggtggtgggccaacaatcagaaagaagacctggacatggagaggaacagagcaaagacgggctggggcccacagggcattgcccatctgatagtcacgatatcagcctgcaaagggatccagagaaaaacgaccactatttctcttctgcctctcaaacctcatgcaagtgtctcttttggccaactctatttaggatccatagagggaagggattctgaaaaacacagttcctaacatagccagaggtgactgtggaacaatccagcacactgagtacatttcaatcctgctccaggatttatagctttaaagttattacacatatgaacacgtggcagcgccaaatagcactggttgaattcagagaaagccatggaaaaggtgactctggaagtggacccgatatattttctatctaaaatttttttcatgcactgaacattcatcacatagtagctgacgtgtaacagattctccgatgagcaatataattcattacctacacatgctgtgctgataccaacattttccccaaaccttccttcttccttagtagagagttctcaaccaggatctgccacctccagttattcacaaacagtggcggaagagaaaattccaagcttcctgtgtgcctcgcattcagggtttcaagaacagttctggtgaatcaataactgttctttcaacaaggatggagagcaattgaaaaggttggctgtgacatgaaattgcagtgtggctgcaatttccttgtattttctaaacaagaccttaaaggctccagaacattgaaacgctgtgggtgtcattcactcttacaatagccatttccttggaccgtcttcctttctggatgataaaagcccaaaatgccaggcactggctgtcctaccatcacacatagccaggacctgccttgtgtcccaatcctggctcccagcatcagagggaaagttgtgaaaaggtgctgctttctcccagataaaaagaaacatccttttccctcctcaggcttctgcagaagacagctctggtggccgtgttgagagctgtgagagaagtcaggagaatcacagagaagcaaaacccagccctgtgacactgctgacattgtgagacaacctgcaaccacccactgcttgattcctctcatgccagatgatcaagccactcttgggcctgatacatttttaacatttccagttttgcaagggattcactgctttttcgcagcccactggacttaactagagtgcccaagcaagcccacttagggccacagaaaaacccaagtgctctgtatgcaatctccatgctttcctcgggctgcctctcatgtttcctgccagactctgccatctcctggctttgctactttctgttgccagagatttgctctgaaccttggcttctgctgactcaatcatcaggctttggatgtattaacacaactttgccctttgttctccttcagaataagaagtccatttcctgccccatgcatcctttcaccccaggtaacctcatgccccagccttgacactgccaagctgggtctacctcatgcccaccaaacctgtcccaacccactcctcctataggcataaaatagatgaatggagaccacgtggaactagtccataggactgtgtataacaaagcttcatgggaatttttctagggtcacaatatattttcagttgaacgcacggtgattcacgcctgcaatctcagcactttgggaggccaaggcagaaggaccacttgaggccaggagttcgagaccagccagggcaatatagtgagaccctgtctcaaaaattaataaaatcaaattaaaaataatattttctcctatgtaattccttagagttgaatgcatagacaccaaaaaggggaaagtttgaaaaatcagctatagtaccaagaagaaatcaatgcccagagaaggaataataccaaattcattagagtcccagactcttcctctgtgttaactctagtcatgtatttgtttatgtggaggtcttctacagtaagtattggggcaatactgatacctgttaaaggatattatgcctttgacaaacgatttttttcttccactacatgctaaatgctgtcattatcaatatagagaatgtagttaaacttccacagtgggcacaggtgaagatttcactgccatcaatttcaaacctaaaccctgatctcagtcagtatttataattttatgagttataattaggacatccaatttgtcttgagtttgcacatcattatgcttcacaatgaaaaataagcaggttcttggtgcctgaattttgttaatcattcttcctggttggggaccttaatcttggcttcaactctgacattaaattaaatacacttgcacacaaattattctaactgccttatttagccagagaagaacagggcctgtccgtgaagcatttccccattacctgcacctgagctagtccctgatctagcactgtcagctccgcaggcaggcctggcaaggtttaccgttctgccccctgccctgggaatctgtatccaggtctctgagtgttgcttcttctggcctaccctatgcccccacaaccttcacacccacccgctactccaaatctgattgggtccctctacgtaggtgtttccaagtggtaaactgcacctagtgctatcgtttggatatctgtcccctccaaacttcatgtgggaatttgatccccagtgttgcaggtggggcctagtgggaggtgttcgggtgatgggggcagatccctcatgaattgatgaatgccctcctttgaggatgagtgagttctcacccttagttcccacgagaactggttgttaaaaagagcctggcaccagccctttctctcctgctccctcgctggccatgggatctctgcacacaccagctccccttcaccttctgccatgagtggaagcagcctgaggccctcaccagaaccagatgctggcaccgtgcttcttatgcagcctacagaactatgagccaaataaacctcttttctatataaattacccggtttcaggtattcctttatggcaacacaaaatggagtaggacacctagacatccaggtttataaatgtagacacatatatacgtgcattttcacacatagcttgttagaatgtgtgtgtcgctggggctcttttatctatacacttggaaaaaggcgtctgcttcattttatttttgcctttgctcacctcggctcctttatttctgatactagcaactcaagaaaggggcattttaattcaatcaaccaagaaaatcaatcccaattgacctcgggaccatatttttattttcattgaaagttaactaaaattattgaaaagaatgaaaaataataagaaacagaaaaacctaatagcttggaacaacatgtattcgctaattttgtttactaatacctccatccaggggagttatttctagcaagattcttttttatttttatttttattttttttttttttgagcggaatctcactcagtcatccaagctagagtgcagtggtgccatctcagcccactgcaacctctgcctcccaggttccagtgattctcctgcctcagcctcctgggtagctgggattacaggcacataccaccatgcccggttaattttttgtatttttagtagaaacggggtttcaccacgttggccaggctggtctcgaactcctgacctcaaacaatctgcccacctcggtctcccaaagtattgggattacaggcgtgagccaccatgcctggcctgcaagatccttttttattgaggcaattaaaagttagaagagaagaaatggctgtgtaaaaataggagcagatagaaaatgagaatggccgggtgcagtggttcatgcccacaatcccaactctttgggaggccaaggctggtggatcacctgaggtcaggagttcaagaccagcctgcccaacatggcaaaaccctgactctactaaaaatacaaaaaattagctgggtgtggtggtgggcacctgtaatcccagctactcaggaggctgaggcaggagaatcgcttgaacccgggaggcagaggttgcagtgagccaagatcacgcctaggagtgcaaaaaaaaaaagaagaaaagaaaagaaaatgataatcttaccatctcagccctcaagtaaaagtaaagggcagggctaagtcagcagaatgatcaggaaactgattccacagccctattgcctaaatagggagggacaaacaagattcaggcatttccctcttggtctacatgtggattaggtcccccaccagtaaaaactcctccctaatagttctcacagttgttcacctaaacctgagcagtgctctggggtgcattagctggtgagaagctctccttgcttgagccagttttaggagaaggaacagtgggattgaaagtcactagggagctagcctatggccaagtgctatgaatggcctgccatgttccagaaacccccatgtgagatctttctctgggttaaagctccatggttgctaattgctgtgagagtgatagagtcccctaagtctaatcaagcctggaagctgaaggacattgtgtggacttgggccttgagaggttcccgaactccagaattctgcaagttatatgactttcatttaaattttctttttaattgagaaggagtctcactcagccacccagggtggggtgcagtggcttgatcacagctcactgcagactcacactcctgagctcaagcaatcctcctgcctcagcctcctaagtagctgggactatgggatatgccactatgcccagctaattattttttggtagagatgaggtctcactacactgcccaggctggtcttgaactcctagccttaagcgatcctcctgccttggcctcccaaagtgccgggattacaagcataagccaccatgcctgcagttatatgacaatgattgtttctctttaaacgaggaagcattagctcagagaaatgagaaatctctgtatgtagtagatgatgcaaaccatgctaaaataaacacatataattggagaagctaagatcattcttaaagctaggtcagtcattccagctgccaatcaaaacctgcacacaaaaacctggacataagtatttatagtagctttatttatttataatttggcatagttgatgccaaaacttggaagcaatcaagttgcccttcaataggtgagtggataaacaaattgtagtgcatccacacaacaaaatacgattcaacgataaaaagaaatgaggtatcaggccatgaaaagacatgaagaaattttaaatgcgtattactaagtgaaagaagccaatctgaaaaggctacatactatatgattccaactatctgacattctggaaaatgcaaaaccatggagacagtcaaaagaccagtggttgccaggggttgcaggggaggtagggaaagagagggggataactaggcggaatacagggggattttagggcagtgaaactattccatatgatacggtgatggcggatatgtgttatcatacaattgtcaaaacctcattcaacacaaagtggatcctaatgtaaactatggacttcagttgagaataatgcatcaatattggctatcagttacaacaaatgcaccgcaccgatgcaagaagtttatcattggggaagctgtcaggtggaagatttgaggagatacaaggataaaggggataaatagtatataggagacaaagaacaagacttggctgaaagaaggcaacatattagaaagaggttttataagaagccattcaagtgaagaaatataaggatagactgagagccgattctttgttaaagccgtgctttccaggccttgctcttcccaatctttaccaatcttcagcaatgcagaggaggaaccagagactctgggagacctgagattcatctgcacacccagaaggtggtaaaagcagggtttggacgaggtctgtctgcctcacagctcctgatccttcctccaccccaccctccctttgactacttagaggagaccccagcttgtcttctacttgggacaggggtagccatggaaatactaggaacaacttaacagttattcccagcagctgcctaaggagattttctctgcaagaacagaggataatgaattctcctaaagaatgagagaaatcccagaggtaaacagagatgcaaacacccaaaaaggtcacagtcacaacgatagcccagcaagacagcatcgaacgacgagtctgctctgtctttagagaagaggggtgttttctgagagcctctcactgcagattccctgctgatctggcagctccagcctagcgctcagaggaagccacaatgagaccaattttccacagtcctaagaagagacacatccccttctgtgtatacatttctcttgtattcactgttttcactcaccccctgcagcctgcatgagatttgaaattacaacccttataccttcaagtccagattatccttcttaaagggaatcaactattgttgaaatccccagataatcccccaacctcatttgtaccattttttgtactgctttcccagaaagttcaagccctagactgaaggaacacatgaagtaaaattgatggctttgaatggaaaatcccagccaagaatccaaccgaacatggtgtaccagggccccaagcatgcttcctgttccccactagctaccggctcccaggcccattcctgctcagactgccgtgggcctgtgcagacagccctagaggaggcgaggaggttccttccagactggatgaggtctgggtaagggcagcaggcacagtgcagactcctcccgcgagctcaggtcagggcacagtctggctgccgtcaaggtttggatcttaatctccgatttggctctaaaagctgctcaggcagcacccagtgcaataactgtggggcaaaatcaagaagtatctagcaggagagggtttccagaacaactgtgccaggggtcctaaaaaccgagcattgagcctatggacactagcccctggatggtctagaaggcccaggatcctactttaacctgttctcccagccaagcaggagcaaaccacatctgacttaatatactcttgtggaagatctacctgctgtatgcttcctcacagtctctgctagagccactagcatggtacaagtgaaaacaagcttgcaggacggacacgtgggagataaaggggaaagagaggaaagagagggaaggagggaaagtgggggagtgaaaacagtctctaggtgggcaaagggtaatgaaaatttcagtgctagaactcccttctcctccctgcttcatttctgtatctttgaatcttatcatttgctctagaccccagtgaaatctccacaaagtcttctttaatgccacaactgaatactgagagctccccatttcccaagtgtgttgggcaatttcagtcggaaccaccaacacagccctttatgacatgcctctggtttcgagtatataacctttgttcctgacacactctccaaacaggaggcttcacttgctcaaggacagttatgctagacactttccttgtagccaagatctaggactgcacttcacccttcaagaggggcattcgctcactgattgaactccctccccaagtcccagcatgctctcatctatgtaggcactggcaggagaaccctcgagagcttttcttcaggaccaagggaaggtagtgctcttgttccctatctctgggcctccagagtatgagggcacaaaggtacagcagagggcctgccaatccttggcctaggcatttcaggtggtctggagctgatattcatccagaaatgggttactatttttcaaacatacatacacacatttgatttataaaatacaagccaggcatgaggacttatgcctgtaatcccagcactttgggagaccaaggcaggaggattgcttgtgttcaggagattgagaccagcctgggcaacatgaagaggcattgtcttttctttgctttttttttttttttttttttttgaaacggggtctcactctgtcacccaggctggggtgcagtggcgcgatctcggctcactacagccttcacctcctgggttcaagtgattctcctgcctctgtctcctgagtagctgggattacaggcacccatcatcatgcctggctaatttttgtatttttgtagatacagggtttcaccatgttggctaagctggtcttgaactcctgaccacaggtgttccacccacctcagcctcccaaagtgctgggattacaggcgtgagccaccatgcctggccaagaggcattgtctttacaaaaaaaaattgtttaaaaattagccaggtgtggcagtgcatgcttgtggtaccagctaattgggaggctgaggtgggaagtttgcttgagcccaggaggtcgaggctgcagtgagctgtgttcacatgacaccactccagcctaggtgacgaagtgagaccctgtctcaaataataatttaaaagaataaaatacaaagtcatttcaagccattactgactttttattaacattttgttataaatttatttttaaataggtagatattagaagttcaggtcccaggattttttgacatttgaaagaacttcaatgtcatattagaacattttggaactactgatccatacatgaatgctgttcctctcctcattcacagtcaggtggcatgctgctagctgcagtccagaatccaggttccccatttatgaacacacagtcattgagtctgccaaaaatcagcttctgaatttgcagaagttcaaggcttagggaaaagtttaaaggcaactgatgcaacagtcacgcttgaccaatttgctgggagctgaaatcatacacaatctataaatatgacttaaactgttctatttcagtttataataaacaataaggctcagctccaatccttccctctccccagtgaggattttttttttttttttttttttttttttgttgagacggagtctcgctgtctcccaggctggagtgcagtggcgcgatctcggctcactgcaagctccgcctcccgggttcacgccattctcctgcctcagcctccccagtagctaattttttgtattacgcccggctaattttttgtatttttagtggagacggggttccaccatgttagccgggatggactcgatctcctgatctcgtgatctccccgcccgcctcggcctcccaaagtactgggattacaggcgtgagccaccgcgcccagcccccagtgaggattattcagagccctacccttgcatagttaggaaaggtggggaccaagtttcatatttcatggtattaacagacacaacaaaactctctttccttgacccaattcactgcctttattttcacaaactacttggtgcaatagtcatttagcatagcgtgtcccactaaaataaatggcggcatcatttaaatgccatactaacttgttatatttctacgtgcttataaaccatgaggcaactatcaagttaataaatatccaaattctgatggatttacatattatattgttgacactgtatttgcattcagagcaaaaatgaaatgggtcttaaaatgagtcgtgataaagtgattgctatcaaaaggctggaagatggatccagacagccgtgggcttgcaactttctctgtcgaacaacaaacatagccaaagattaaagtgctcaaataaaaattagagcaggtctgccaaccccatttccacctctacctgatgagaccagtgttcatgaattactatggcccataaactgtgttgtgcttcttatccactattgaattcaatcctccctaacaagcagatgctattcttgtcactatttaacagataaggacactaagcctcggttgtgtaagaaaacacaagtaaacaatctagtacaaagcaaactcaggcaaagtcagactcagaccaagattttctgaaaatccaaagcccatactattcctcctacattactttgcctctcaagtgaaatattatttctttgcctagcagccttcacttacagccagggtgggtgtggacagatctgtatatggctctagtataagaaagtggggagatgtttagaaggctcaaaaaattgttgacaccaaaaattcaaactatcccctgtccacagaagtcccagctgagtttttaaatcaatattccctcagctgaccatgataagacagagatttcaaaaatcaaatatgcacagacatgttccacttactcactcatgtaaacttcttaaaaactcggcaatgaattaccatatggagctccaagtacaaatgctgtgtctatcgcctttgaggtctccaggcagaggtgagcagtgaaggaaggactctaggggatgggcataatgcatggtgggcagcttacccatctcaggaactggcttcagccccatggcaccacagggatggaggtaagagattgcaaatgcagtgggctgactgcaactgtgctattaggaaaactgctaaccccaatcagcagcaatcacacttgatcttcaggatgactttggagcagttctcagaactaagcagtggagagaaggccaaatgaggttatacatgactcagataaagctatggataaattaattttgttttcttgtgtgaacatttatcccaactgaagaattatagtgttggcatgaatatgcattaaaagaacagaagctgaattgtgttccaaaggaattgtattgactacacaagcagctaatgacatggtttacttctctggaagaatcagcactcattttcagagtgaccttatagtttaaattctttgaattgagagcacaatgaacaagctcctctactgaatttataagtgactatgacacggcaacaccaagtcactatctgggtaactcatctgcctgtggaaacctgtgttgatcgttgcttttgcaccagccttcctaagctagtgctgtctgcaaacagacctttctgtgcagattaaagagagcctgattcagtagaacccacatgtcacagatcatttgctttgcctctctcgacacagaacttcagcatctgattaaaggaggccaggtgtccaacatctggccagatggatttgtttctgagcaaagtcagaggaaaccagaggtagacatgcacctggtccccagtcagcttagcccttttaatgtgcctagccatccctgaagttctgccctgttaacgaaataggaatttgccattgctatccttacaggtgttcacaaagccatagaataaaatgactacaatttgagatcaactgactcaaaaactttatctcctagaggaaaggaaactaaagtccacagaagttaagtgactaggccaaagttacccagctaggagatggcaaagcttttaaagacaccagactctagattccatggcccaacctcactcctggttattagttgcatctaagacaatggctttcaaactttagcatcagaatcatctggagggcttgttaaaacacagattgccaggtcccacccccagagtttcagattcagtgtttctggactggggccctagaatttacatttctaacaagttccctggggaatggtgatactctcggtgtagggcccatatgtggagatccactgaggtagcatgtgtgattagataggaggaaaagttgctcatctgaccccagggacacaaaagatttatctaaaaactcagaataaagaagtttgttccagtttccaaatctgttctaggctatgtaagttagggggaatttgtcttctagaatgcacattttagaggcttttaaatgtctgggggaaaggcttctgttcatcctgataaaccatcctaaggaagctttacatttgagtctgaaattaaagatgacgaaataatcctcagacaaatatagaagcccagggaaaaggatgggtggcaatggaaggtgggcacaggcatgtgggcggtgatgtggcttggctgtgtccccacccaaatctcatcttgaaatttagctcccctaattcccacatgttgtaggagggacccagtaggaaataagtgaatcatgaggttggtttcccccatactgttctcgcggtagtgaataagtctcatgagatctggttttataagaggtttcccctttcccttggctctcattctctcttgcctgctgccatgttagatgtgccttttgccttctgctgtgattgtgaggcctccccagccatatggaactgggagtccattaaacctcttttactttacaaattacccagtctcaggtatgtctttatcagcccggtgaaaatgaacaaatgcaggtgggaaaagaaggacacgatcagtggatggaacaaggagcactggggctcagaagcagtctggctcagttgggcacacgcaatcaagaacatgggaaaatggcagctggattgttgagctggaatcaggaatgccagaaataggatagagggcaatgccagtgttggttcactaagagagaaagcaagacccagctgcgactgcagctgactccattcatttattgaatcattcagcaagcatttactgggcatctcctgcatgctaggccctgcactaggactggggatgcaaaaagtaagaaggcattgcccaagaaagagaaattgtgaacacaaacaactctgatggaatggctaaatgttcaacagaggtacaaagcactgcatagcagagttaacttctgcctggagaaacctctacttgaagtttctcttgcttttatcactggccaaaggttggtttaccccagcgctctatccttggacttcttgttgttaaaggcttttgggtccagggctggtatttatgcctgtaatcccagtgctttgggaggccaaggcgggaggatcacttgaggccaggagttcaagaccaatctggggaacatagtgagacccttatctctacaaaagtgagtaaataaattagctgggtgttgtggcacgagcctcacttgagctcaggagtttgagtgcagtgagctatagtcatgccaccacactccatcctcggcaacagagcaagaccctgtccctaaaataaaataaaataatataaaataaaaatttagtccagtggtgaactccaaatgctatacttgaactcacatgctgaatctccatctccaacctgatttcctccaagctccatctcctaggctgtcacttccagctgtcctctaggcatggatgcctacatgtcaacctttttatctcaacatgtccaaaagcagattcattttctttcatatttttaatcatataagctaatggctttactatctaaacatccttccagacatttttggctcttctcactcactttccatttctgatgtcaccagaatctcttattcctactcccataactatctctcatctggccttttctctctgtaaccactgccttcagcaacactccactatgctggctccttcagacaattagaagtgtgagggagaatggatgagaaaggggtaaaggccctaggctggcctgtcacaggctctgcccagaattcaactggtttttgaatggtcaaagcaaaaaaccaactcatgaccatctctgaatgtcagactaaggacatttgactttatttggctggccatgaggagcgcggaaaagcttttgtagagagatgtgatgtaatcagaggtatgcattaagaagattaatttggcagtagcttatagaaaagattatatggaaaatagattagcagtaaggagatcagctaggacataattgcaaaaggccatatgattaacagggaaggtttgcattcagttggcagttgtggaaacagaaagtaagagatgagggaaatattttggaaatagagttggtattactttttgaagtctgatgttaagggaggcagaattcaagcattaactcttgaggttctatccttgactagccaggataatagggatttcacttagggaaagaattatggggcaaggggagaagggaatgaagaaatgcagtgttcagatttaggcatgttgagcttgaggcactattgcgatgctaagagagttgagggattctgattgtgaggctgggacagaaagaccagagcctcatggccctacttagaggtgaagagaagctctgcatgaaactgatcaaggtataagcctgaccaaaacgcttttgtaattggtgatgataagaataccaacacccttgaagtagaaaaaagccctgtaagaagaaggggtggggaaactagactgccatcactgctgttcatgatgagaaagtagaagtggcacagtagattaatcattagcagtgatagaagtaagagaggcagaatcctagtcaaaggctgtagaaagattgggaaggatgtgttgccttgcggtgacgtgaattagttttcaggcacagagacccagaaaagatagggagaaagaaggagaaagaacaatagagagtagataatagataatcttagaaaagagacaaataaattaagatcaatgtcaaaataggaacaatagtctggaagaatgaaagatgggggtaacccagaagaaacaatgaactttcttctgaatgggagacgaaagcaaaagaagggtcaaggaatggttcacaaaataaatgaaggatgaatgtttaacgcaagtctttaaaaatatgtagaaaatgcaaaaaggagtaaatacagtatgcacatgaatgtaagaattaccaagctataataagggttatacatgaattaaatgaatgttttgagggcacgatcaagaccacgttgttgcttttcccttaagcaagcttagcacatttcctcctcccgtggatgttcttcagtcagagggtggggaagactaaggacagaaggcatctagggcacgaggtgagagaaacgactgagcacaggacacaggctggtagggaagataagtgaatcccaaataggagtgctgagggctccaggatctcttgatcagatgagggaactggtaccactgaagaaagctcaagagaagtgcacttgctaggagaacccagatcccaactaagacgaagtacagagagcacttagggcactgattgagggtactggcgaatttagccacggtgggattgaagttgtctggtagtcagtggaaggattgggcggaggagtctaagtgagcacaagagagcagaaagcctgagaagtcagggaagagggaggagtttgcacctgtgaggataaaggcgatggagcctgagttgtaggtcaatcccttttgttcactcaggtctcaggatccagccaactggaaaaatcagtcatacttctccatctcagagggatgaagcagatcaacctaaacattcctctattgttccattctcgtggtccatttgtctaagactgtctcttccaggacaccaaaggccttgtttgaggaaagcatgtgtttgttgcgaggacatcgaattaaagttaaacttgcttgtctcctaagcctctgcctttaaatagtgaatgacttcctttgtcataaatgaaatcttcagtttacttggatgttactttgattcactatcttaggtctctgtcagggacctaagatagtgtcctctctaatcctcttgggtcctaaactagagaatcattctgactttcaccttcctcaacaccctgtccctctgctattagtccttgctcaacactgtctgttgcatccaacccttccttctataaccagtggtactacccccacccagattactattgttgacattacagaagaggtgcttgctgaggtcagtgtctccaggtggaggccagctaactctctctccagggctacctggatgaatttaccaattcattcaggctggccaatgcccaaagtccactggggaggctcagaatcacagtttcattagaaatctcagaaacggactcactaaccaagctcacaaatgctaaagcataagtaagaatctcaatgtagtaatattccgtaagaaatcctgcagccacacaggccagaatgactaatatattctctctctggcataactgtgtaggaagtctttgcagctgtgtttcctgctccagcaaaagtcctgcccataagactataaatcttcagtccaaaaagccaacacactacaactgccttttttatttccttccactgctaacaaattccagggatgactgccattttctttacatgtgctcgtagattccattcgattacagccaagccttgatggcctgggggaggttattctgtctctgtgtccaggttcttaaccttattgtgcataaaattaaatacagaggatgacaaaggaaaccaaatatgttgaaatgccattattaaaatattttttaaatcgccatatagtaatatatgtgcatctttattagttagaaaatctagccctgggtgtcataattttaaagtagtgatgagcataaagaatatttcaaaatgtatccatcaactatatgtgataggagtatgtctgtgatttctattggtgacaaagtcacagttactgctcataactactctggcttattatctacattcataatttaagaaaatgctaaattgcaatcagaggtttgtataaagatgtaatttttttctcatccagtaatcacaggtttcctgaattctgctcacagacatcaaggatctgtggatcccgggttaagagccccgactgagttgatgtggcatgtctctgctttcctcgcgacatgctgatttcttagtgtatctctcacatcacagtttctaagttcttgggcaagtcattccatttcataaatactacctatcattattaggtatattctccatctttgcaagaacattgttttttacatttgaaaatgtatgagacgatcaccaaaaactggaaacaactgaaatgtttgctaagtggtgaactgataaattgcagtatatctactccattgaatactactagtaaattaaagaaaaaattaataaaaacatgcaacaacatagaggaatgttaaaaggaattatgccaacttcaagaagccacactgacaacgctatttactgcaggactcaatgggtatgacattgtggaacaggcaaaactatagccacagaaaacaaatgagtggttgccaggggctgggaggaaggaggaaattcactacaaaatggtgtgagaaaactttctggatggaaatattacaactcttgattctgttgttaattacatgacttacatacatttgtcaaaattcatataactgtacacctaaaaaagaattttaccatatgtaaattatagtgcaatatatcttttaaaagtatgataaaatatattcagaccttcacataatagaggtctttttaataacatttcactgagaaaatacaagtgtgcatgtagactcgagaatctgcaataactccagaagggcaggggtgcaggtaaccttgacccacaggctgcaccctactgattacacaactatattagtgtcctaaatggccacttagcctgtatatttttctcctccaggctcttccgggctcagtctctccagtttccatcctgttgttctgtcagtaacccagaactctcaataacctcttttaatttttgttctgtcaataacccagaactctcagaactctcaataacccctttatatagacttgttagtggaaaggactttgaaggtcatgaatttccaactctgactcactgctgagccccatccccagtactcctgcctgaggtcagcgagcttctacctgggtaccctagtggcaatggggttccccacctcatgaggtagagtgctctatgggtaataaccctgaattactagataggtttatgttcttacttacagagaaaactcaaacttctcgggagagcactaaagatcttccacagtctgactccaaatggcgtctctggctcatctcattaggttcatctaatccacacggtaggccctgctctactccttgttctcaggccatgcctagtgttcttccacttttgcacctgcactcattctggtttctatgtcttgtaaaacagattgtcttgtcctgtaaactcagtgctcagagacactccctcatccttccttctctaaagagactccaagagtccaataacatctatgatagcaataacaaatatcatagccaaacactcttaactaggcctcagtgtgttatgctgaaattcccaaaccaggtgtaataaatggtttacaggaatggtcccttctgcccttggagttgccaaatgaggcctggggaagctggattccctgggctcattatctccaaatggagaaatctcttccatttatcccaaaatgctaatacacacacacacacacacacacacacacacacacacacacaaaataaatatgtgtgtatatataatatatataattttatctatataaaaattatttttatgcatgtggaaaactgaagaagcacagcattcagatgtctctagggcccagactccatcagatcccaggctctagaactgctcctacccctcctgacctgcttgttccattgtctccatgactatcccactgcctcactcctggtccgaccctctcaccctagctcattaacattgatgcttcgtcagattctacgcttggttactactcctaggttctggattttcctccattcctagtgccacagcactcatgccattaatttcttcttccatccccatcaacttgaagctctcaaatgctttccgacttgtatgggagaggaattccacacactgctcctttttcctctgtagattctatttctccttgatgatcaagcttcaatctcacctcttcacagacagcttccgagatcccaaagtcacttcctccctctgtgaattaccatccacctcatcaactgtttcctgttgactgggcatattttttcctacttcttcaacttttattttaagttcaggggtacatgtgcaggatgtgcaggtttgttacataggtaaaagtgtgccacggtggtttgctacacagatcatcccatcacctaagtagtaagcccagcgtccattagctattcttcctgatgctctccctcccccacttgcccctcctccagcaggccccagtgtgtgttgttccccccatgtgtccacgtgttttcatcattcagctcccacttataagtgacaacatgtggtaattggccttctgtttctgcgttcgtttgctgaggataatgtcttccaactccatccatgtccccgcaaagagcatgatctcattcctttttatttctgcatagcattccatggtgtgtgtatgccacattttctttattcaatttatcattgatgggcatttgggttgattccatgtctctgctattgtgaatagtgctgcaatgaatatacgcatgcatgtgtctttataatagaatgatttatattcctttgagtatatacccagtcatgggattgctgggtcaaatggtatttctgcctctagatctttgaggagttgccacactgtcttccacaattgttgaactaatttacactcacaccaacagtgtaaaagcgttcctttttctctgcaacctcaccagcatctgttgttttttgactttttaatagtagccattctgacaggtgtgagatgatatctcagtgtagttttgatttgtatttctctaaggaccagtgatgttgagcattttttcatacgtacatattcttaataattaaattataagcaatttgaaggcacatgcctctcttgatagctcccatagtgatggctagctagcacagtggctcacattaggaagatgcttaatagttgcttcttttaaattagttgctgaatttaaaatatctctctcagttccaaggttgaaagaaaatagaagtagccaaaatctatatcctgaaccacgcacaatggattatggccacagaatcagtacagctgatctaagggatatgtaagtacagacacagagtcaaccaaataaatcctctttaattctggctggcgcgattgacacataccccaatgcagtctcttggtaaatggggtaagttattaaatatcgcaaggatgtgtttggagaggaaatggtatatatcatatcaggtatccagaaggccacaccccacttcctccttccttcgcagatcatggccagagaggccacctaagtggcctccaactttgagcttgttttgctacactagctgcatgagagctccggggggaaggcggggggtggataaaagaagcccaaaggaaacctgccaaatagattcttttaaaaaataccttaaaaatttaaacttcctcttttgtctgcatatccaccccataggtaggggtggatgagctttgagtaattctagaagccaaaactattaactgtgtctaataactgtttatggataaaatcttctaacacgtgtgtgatcactaagacagatacgaacctggaccaagacatgggtgtcttgcctgaatcatcagagctactgatatacaacaaaatcccccagatagtgacaggtgtgttctcaagccatgggtgagactgaagttgccactcttggttatacagtccccaaatatggggcatggcagcacacaggctaagagttgtggaagattcttatacaagggagttctcaatggttgttcccaaccaggttggcccccaaaattcaaccaagaaactcaaactacaattaacaaaaataaaatatggtctaattaatatatcctagataatgtttgcctttacttggatggctatttacatggacaagggaagaagggaagataagggaaaaggctttttatgtgtttattcaacaatggcggaggagaggcatgccagataaggcagacacgggcattccaaacacaagaaaggtatgtgctgcagagaagtcagataactttcctaggctctcctgcagtccggatgaaatactctcaaaaaattagcccgggccctttgctccaatttttcgcttacctagcaaccatctaactattaattaaattggtattatggttttaacatgaatcttttatgatttgcttaccattaatcaaacccccgaggcttattcacctcaaggggagctgacaaagttgaattattcaacctgcaaagatccagggcccccaaatactgtcatttccactctcccctaacccccaccatgaggcccagtctcagcactcggccagcctatgcccaactcggggtaatcagcttagacatattaatattagtgggcatttcagtatcaacagatcactgtctagcagctgacaggcaccctcagaaaataaaccaagaagaaagggtttatctataatatcaaaatttttcatagataaacctgcccattataaggaagagggcagaagaaccctaaactaagagccaggcaacttgttcattaatcacagcatattccatagaaggaggagaaatgttgtcatcaaattcatctttttcacctcaattaaacatctatgctacagctccacagtcagattgagaggaaaaacagtacgtagctaagaaaagacatagacttgtaactgaaatgcttcactggtgctccttttgttttaaggcattggatcttcatagctactgatcgtgcccaagcacacagtatctgcagcaaccacttaggcctccaggaatgtggtgaccattgaccctaattcattccccttcatggatcctatgtaaccatcctccaaaaagagctttcgcaaactcaaataaacacaggaaaggaagaccttcttatctttgagagtatatgtttagccctataaccctctcttatcataaattgcttcttaggcaagaaacactggatttttcttgtatttgtcattgccattggttccatacaagcattcatttaacaaataatacattccatctccgttttttgctttttccttcatgcttcggccttggttttctctcacctaaaacactacaagcttcttctcccagagctctcactttgactccagactacctacatttaatctttaattctctaccaaaattttctcttatctttatatctttttaattttaattttattttttgtggatacatagtaggtgtatatatttatggggtacatgcaatgttttaatacaggcatgcaatgtgaaataaggacatcatggagaatggggtatccatctcctcaagcatttatcttttcagttacaaacaatccaattacactctttattttaaaatatacaattattaattatagtcactctgttgtgctatcaaatagtagatcttattctttctattttttgtaccctctcgtctttttatattaaaaaataatctttatctctgtaagcttcatcagtgattttccaatgaaatttaggatcttctctataccctgaattgccttactttctccccacttccttgtcttattcaaatgcagatttcattaatgatttccagatcaatgatagttcagaaagcaagcaagtcaaagtgaccaagggcatggcctgaaaactgttctaagagaggaatttacagaacaactattaaatgatgtcaataggattgtattagtccgttttcatacggctataaagaactgcctgagactgggtaatttataaaggaaagaggtttaattgactcacagttcagcacaactgggcaggcctcaggaaacttacaatcatggtagaaggtgaaggggaagcaaagcaccttcctcacaaggcgtcaggaagaagtgccaagcaaagggggaaaagccccttgtaaaactaccagaacctgtgagaactcaatcactatcacaagaacagcatgagggaaccgcccctcgtgattcaattacctccacctggtctctcccttgacacatggggattatgggtgttacaattcaagatgagatttgggtggggacacaaagcctaaccatatcaaggatcaagtggtgggttgaaactaacaggatgagatatatcagatacaaacacagggtcccatatttgggttaaaattcataaatgatcaaagcacaggatgacagataatataggtcattttagattattgtggccaacagatcacagtgggtagtgttatgacgaagggagggtcacagttactacagttacagatggattctgggtacaacatttgcactaaagtgcctttgccaagggaggcaacagtctcgacatcctgtggcctgatctacttcagggactgtgtcttgttcagagcatcacatttgaagagaactttgaccaaggggaatatgccagaaaaggaagttcgggatgctgaggatcttaggaactatgtctaaacaagattcattcacagaagtgggaatgtctatttggcaaaaagaaaatactacttacatggctgttggaagaccagcaatcacaaactcagtttttcaaaaggctgggcagaaacacagatgaaagaaacaggccatgtttaagaaaagataaaagctcacgcatgatatgccactagagaatcacctagcctcagtgttggcggggaggcctggggagtcttgatgtctgagagtgacattctgatgatcactgtcatgtgtaaatgttggcctaaagctgccaatatttttgatttaagagaagcaagaaatgcaaatttttatgcagcatgtctcaatttttaattttggcaactattacaaaatgtttaaagagactctgtgcagcccaaatataacatatctatgggctgatggcagcccagcgttgccagttcacagggtctacaagagatgattcttagtttcaacagggtgcagtgctgaaacgcgtgcacagtagattttgcttcggttatgaaagaacttccaaatatttatgattcatagccagagaaaaggctctctatccaggttctgaacaataggaaatcatcaagaggatattggatgacaatatatgaaagatgttatttgagaaaggattctctcctgaggcatagatgttgaaccaaattctattagttatgcttttacagcaagatagtggtttacagcttacaaaaggcttgtacatcctctcatattaaaagttattagaacagtcctttgaagtagaaaagtaggcatttctattttacaaacgagttggccgagtatctgagatagtagataactcatagaaggtcatccgggaaacggggcagcagaactgggatcgaatgactctggtcatccaactccaaatgcaaaagtctttctgctgctgcttcctagttaaactctaagggtctaagactccattcctagttatggtctcaactacatttgctcattgctgtgaggggtcaacccacctcccggagtcctctcctgcacattctcatgttcctgaaaggcttttctgtcccttccactactccctgtaagctcctgtgcttcacaatttcttgttgaattttttctaatctgactctatcagttatgggaatgttccctcaattcttagtgctccaaaccggacttgctcttggcttgtatttgtccaaaatatttgtcttctctatgttttctacatgtttgtcttataaggacaaaaacctgccttagtttatccatgaacaaagccacgcatgctagtggacacacacacacatgcgcgtgcgcgcgcacacacacacacacacacatacacacagagactttgtatgtgagtaatgaatcatcaaatcatcataatttctggacttgtattaataagtcggccaggaggaaaagaatctgctgtcaatcatggcttctggttctcacagtcatctctactttcttccagcaagtttggttctgtcaaaaaccagctgtcagccttgttcctgcatgcccaatgcagaagagtcagtaaagaagatttggttctctgtatttcaggggcatcaatgccaggttgaaatatgccattctggcccagctcagtggctcacacgtgtaatcccagcactttggaaggccaaagcgggtggattgcttgagctcaggagttcgagaccagcctgggcaagaggctgaggtgggaggatgacctgagcccgggaggtcaaggctgcagcgagctgtgatcgtgccactgcactcgagccagggcgttggagtgagaccctgtcaaaaaaaaaaaaaaaaaggaaggaaaaaaggaaggaaggaagggagggagggaagatgccattcttagattgaagtggactttatctgggcagaacacacacacacatacacacatgcacacacacattgtggagaaattgctgactaagcaaagcttccaaatgacttagtttggctaaaatgtaggcttttaaaaatgtgagcactgccaagggtttttccttgttgacccatggatccatcaagtgcaaacattttctaatgcactatatttaagcctgtgcagctagatgtcattcaacatgaaatacattattacaacttgcatctgtctaaaatcttgcatctaaaatgagagacaaaaaatctataaaaatggaaaacatgcatagaaatatgtgagggaggaaaaaattacccccaagaatgttagtgcacgcagtcacacagggagaagactatttttgttttgttttgattgttttgttttgttttggttgttttgttttggtgacctaactggtcaaatgacctattaagaatatttcatagaacgaatgttccgatgctctaatctctctagacaaggttcatatttgtatgggttacttattctctctttgttgactaagtcaataatcagaatcagcaggtttgcagtcagattggcagggataagcagcctagctcaggagaagtgagtataaaagccccaggctgggagcagccatcacagaagtccactcattcttggcaggatggcttctcatcgtctgctcctcctctgccttgctggactggtatttgtgtctgaggctggccctacggtgagtgtttctgtgacatcccattcctacatttaagattcacgctaaatgaagtagaagtgactccttccagctttgccaaccagcttttattactagggcaagggtacccagcatctatttttaatataattaattcaaacttcaaaaagaatgaagttccactgagcttactgagctgggacttgaactctgagcattctacctcattgctttggtgcattaggtttgtaatatctggtacctctgtttcctcagatagatgatagaaataaagatatgatattaaggaagctgttaatactgaattttcagaaaagtatccctccataaaatgtatttgggggacaaactgcaggagattatattctggccctatagttattcaaaacgtatttattgattaatctttaaaaggcttagtgaacaatattctagtcagatatctaattcttaaatcctctagaagaattaactaatactataaaatgggtctggatgtagttctgacattattttataacaactggtaagagggagtgactatagcaacaactaaaatgatctcaggaaaacctgtttggccctatgtatggtacattacatcttttcagtaattccactcaaatggagacttttaacaaagcaactgttctcaggggacctattttctcccttaaaattcattatacacatccctggttgatagcagtgtgtctggaggcagaaaccattcttgctttggaaacaattacgtctgtgttatactgagtagggaagctcattaattgtcgacacttacgttcctgataatgggatcagtgtgtaattcttgtttcgctccagatttctaataccacaaagaataaatcctttcactctgatcaattttgttaacttctcacgtgtcttctctacacccagggcaccggtgaatccaagtgtcctctgatggtcaaagttctagatgctgtccgaggcagtcctgccatcaatgtggccgtgcatgtgttcagaaaggctgctgatgacacctgggagccatttgcctctgggtaagttgccaaagaaccctcccacaggacttggttttatcttcccgtttgcccctcacttggtagagagaggctcacatcatctgctaaagaatttacaagtagattgaaaaacgtaggcagaggtcaagtatgccctctgaaggatgccctctttttgttttgcttagctaggaagtgaccaggaacctgagcatcatttaggggcagacagtagagaaaagaaggaatcagaactcctctcctctagctgtggtttgcaacccttttgggtcacagaacactttatgtaggtgatgaaaagtaaacattctatgcccagaaaaaatgcacagatacacacacatacaaaatcatatatgtgattttaggagtttcacagattccctggtgtccctgggtaacaccaaagctaagtgtccttgtcttagaattttaggaaaaggtataatgtgtattaacccattaacaaaaggaaaggaattcagaaatattattaaccaggcatctgtctgtagttaatatggatcacccaaaacccaaggcttttgcctaatgaacactttggggcacctactgtgtgcaaggctgggggctgtcaagctcagttaaaaaaaaaaagatagaagagatggatccatgaggcaaagtacagccccaggctaatcccacgatcacccgacttcatgtccaagagtggcttctcaccttcattagccagttcacaattttcatggagtttttctacctgcactagcaaaaacttcaaggaaaatacatattaataaatctaagcaaagtgaccagaagacagagcaatcaggagaccctttgcatccagcagaagaggaactgctaagtatttacatctccacagagaagaatttctgttgggttttaattgaaccccaagaaccacatgattcttcaaccattattgggaagatcattttcttaggtctggttttaactggctttttatttgggaattcatttatgtttatataaaatgccaagcataacatgaaaagtggttacaggactattctaagggagagacagaatggacaccaaaaatattccaatgttcttgtgaatcttttccttgcaccaggacaaaaaaaaaaagaagtgaaaagaagaaaggaggaggggcataatcagagtcagtaaagacaactgctatttttatctatcgtagctgttgcagtcaaatgggaagcaatttccaacattcaactatggagctggtacttacatggaaatagaagttgcctagtgtttgttgctggcaaagagttatcagagaggttaaatatataaaagggaaaagagtcagatacaggttcttcttcctactttaggttttccactgtgtgtgcaaatgatactccctggtggtgtgcagatgcctcaaagctatcctcacaccacaagggagaggagcgagatcctgctgtcctggagaagtgcagagttagaacagctgtggccacttgcatccaatcatcaatcttgaatcacagggactctttcttaagtaaacattatacctggccgggcacggtggctcacgcctgtaatcccagcactttgggatgccaaagtgggcatatcatctgaggtcaggagttcaagaccagcctggccaacatggcaaaactccgtctttatgaaaaatacaaaaattagccaggcatggtggcaggcgcctgtaatcccagctaattgggaggctgaggctggagaatcccttgaatctaggaggcagaggttgcagtgagctgagatcgtgccattgcactccagcctgggtgacaagagtaaaactctgtctcaaaaaaaaaaaattatacctacattctcttcttatcagagaaaaaaatctacagtgagcttttcaaaaagtttttacaaactttttgccatttaatttcagttaggagttttccctacttctgacttagttgaggggaaatgttcataacatgtttataacatgtttatgtgtgttagttggtgggggtgtattactttgccatgccatttgtttcctccatgcgtaacttaatccagactttcacaccttataggaaaaccagtgagtctggagagctgcatgggctcacaactgaggaggaatttgtagaagggatatacaaagtggaaatagacaccaaatcttactggaaggcacttggcatctccccattccatgagcatgcagaggtgagtatacagaccttcgagggttgttttggttttggtttttgcttttggcattccaggaaatgcacagttttactcagtgtaccacagaaatgtcctaaggaaggtgatgaatgaccaaaggttccctttcctattatacaagaaaaaattcacaacactctgagaagcaaatttctttttgactttgatgaaaatccacttagtaacatgacttgaacttacatgaaactactcatagtctattcattccactttatatgaatattgatgtatctgctgttgaaataatagtttatgaggcagccctccagaccccacgtagagtgtatgtaacaagagatgcaccattttatttctcgaaaacccgtaacattcttcattccaaaacacatctggcttctcggaggtctggacaagtgattcttggcaacacatacctatagagacaataaaatcaaagtaataatggcaacacaatagataacatttaccaagcatacaccatgtggcagacacaattataagtgttttccatatttaacctacttaatcctcaggaataagccactgaggtcagtcctattattatccccatcttatagatgaagaaaatgaggcaccaggaagtcaaataacttgtcaaaggtcacaagactaggaaatacacaagtagaaatgtttacaattaaggcccaggctgggtttgccctcagttctgctatgcctcgcattatgccccaggaaactttttcccttgtgaaagccaagcttaaaaaaagaaaagccacatttgtaacgtgctctgttcccctgcctatggtgaggatcttcaaacagttatacatggacccagtccccctgccttctccttaatttcttaagtcatttgaaacagatggctgtcatggaaatagaatccagacatgttggtcagagttaaagatcaactaattccatcaaaaatagctcggcatgaaagggaactattctctggcttagtcatggatgagactttcaattgctataaagtggttcctttattagacaatgttaccagggaaacaacaggggtttgtttgacttctggggcccacaagtcaacaagagagccccatctaccaaggagcatgtccctgactacccctcagccagcagcaagacatggaccccagtcagggcaggagcagggtttcggcggcgcccagcacaagacattgcccctagagtctcagcccctaccctcgagtaatagatctgcctacctgagactgttgtttgcccaagagctgggtctcagcctgatgggaaccatataaaaaggttcactgacatactgcccacatgttgttctctttcattagatcttagcttccttgtctgctcttcattcttgcagtattcattcaacaaacattaaaaaaaaaaaaaagcattctatgtgtggaacactctgctagatgctgtggatttagaaatgaaaatacatcccgacccttggaatggaagggaaaggactgaagtaagacagattaagcaggaccgtcagcccagcttgaagcccagataaatacggagaacaagagagagcgagtagtgagagatgagtcccaatgcctcactttggtgacgggtgcgtggtgggcttcatgcagcttcttctgataaatgcctccttcagaactggtcaactctaccttggccagtgacccaggtggtcatagtagatttaccaagggaaaatggaaacttttattaggagctcttaggcctcttcacttcatggatttttttttcctttttttttgagatggagttttgccctgtcacccaggctggaatgcagtggtgcaatctcagctcactgcaacctccgcctcccaggttcaagcaattctcctgcctcagcctcccgagtagctgggactacaggtgtgcgccaccacaccaggctaatttttgtattttttgtaaagacaggttttcaccacgttggccaggctggtctgaactccagacctcaggtgattcacctgtctcagcctcccaaagtgctgggattacaggtgtgagccaccgtgcccggctacttcatggatttttgattacagattatgcctcttacaatttttaagaagaatcaagtgggctgaaggtcaatgtcaccataagacaaaagacatttttattagttgattctagggaattggccttaaggggagccctttcttcctaagagattcttaggtgattctcacttcctcttgccccagtattatttttgtttttggtatggctcactcagatccttttttcctcctatccctaagtaatccgggtttctttttcccatatttagaacaaaatgtatttatgcagagtgtgtccaaacctcaacccaaggcctgtatacaaaataaatcaaattaaacacatctttactgtcttctacctctttcctgacctcaatatatcccaacttgcctcactctgagaaccaaggctgtcccagcacctgagtcgcagatattctactgatttgacagaactgtgtgactatctggaacagcattttgatccacaatttgcccagttacaaagcttaaatgagctctagtgcatgcatatatatttcaaaattccaccatgatcttccacactctgtattgtaaatagagccctgtaatgcttttacttcgtatttcattgcttgttatacataaaaatatacttttcttcttcatgttagaaaatgcaaagaataggagggtgggggaatctctgggcttggagacaggagacttgccttcctactatggttccatcagaatgtagactgggacaatacaataattcaagtctggtttgctcatctgtaaattgggaagaatgtttccagctccagaatgctaaatctctaagtctgtggttggcagccactattgcagcagctcttcaatgactcaatgcagttttgcattctccctaccttttttttctaaaaccaataaaatagatacagcctttaggctttctgggatttcccttagtcaagctagggtcatcctgactttcggcgtgaatttgcaaaacaagacctgactctgtactcctgctctaaggactgtgcatggttccaaaggcttagcttgccagcatatttgagctttttccttctgttcaaactgttccaaaatataaaagaataaaattaattaagttggcactggacttccggtggtcagtcatgtgtgtcatctgtcacgtttttcgggctctggtggaaatggatctgtctgtcttctctcataggtggtattcacagccaacgactccggcccccgccgctacaccattgccgccctgctgagcccctactcctattccaccacggctgtcgtcaccaatcccaaggaatgagggacttctcctccagtggacctgaaggacgagggatgggatttcatgtaaccaagagtattccatttttactaaagcagtgttttcacctcatatgctatgttagaagtccaggcagagacaataaaacattcctgtgaaaggcacttttcattcca

SEQ ID NO: 5762 - DNA, 30 bp, Homo sapiens
  source 1..30: mol_type = other DNA
gtccactcattcttggcaggatggcttctc

SEQ ID NO: 5763 - DNA, 30 bp, Homo sapiens
  source 1..30: mol_type = other DNA
ctccagactcactggttttcctataaggtg

SEQ ID NO: 5764 - DNA, 30 bp, Homo sapiens
  source 1..30: mol_type = other DNA
ttccatgagcatgcagaggtgagtatacag

SEQ ID NO: 5765 - DNA, 29 bp, Homo sapiens
  source 1..29: mol_type = other DNA
gtccactcattcttggcaggatggcttct

SEQ ID NO: 5766 - DNA, 29 bp, Macaca fascicularis
  source 1..29: mol_type = other DNA
gtccactcgttcttggcaggatggcttct

SEQ ID NO: 5767 - RNA, 20 nt, synthetic construct
  misc_feature 1..20: note = Description of Artificial Sequence: Synthetic oligonucleotide
  source 1..20: mol_type = other RNA
ctgagtgaccaaaaggatat

SEQ ID NO: 5768 - DNA, 29 bp, synthetic construct
  misc_feature 1..29: note = Description of Artificial Sequence: Synthetic oligonucleotide
  source 1..29: mol_type = other DNA
gtggaatatccttttggtcactcagacct
